(19) United States
(12) Patent Application Publication
(10) Pub. No.: US 2014/0068816 A1
(43) Pub. Date: Mar. 6, 2014

(54) Plants Having Enhanced Yield-Related Traits and Producing Methods Thereof

(71) Applicants: Christophe Reuzeau, La Chapelle Gonaguet (FR); Yves Hatzfeld, Lille (FR); Valerie Frankard, Waterloo (BE)

(72) Inventors: Christophe Reuzeau, La Chapelle Gonaguet (FR); Yves Hatzfeld, Lille (FR); Valerie Frankard, Waterloo (BE)

(21) Appl. No.: 14/002,241

(22) PCT Filed: Mar. 1, 2012
(86) PCT No.: PCT/IB12/50969

§ 371 Date: Nov. 6, 2013

Related U.S. Application Data
(60) Provisional application No. 61/447,811, filed on Mar. 1, 2011.
(60) Provisional application No. 61/447,797, filed on Mar. 1, 2011.
(60) Provisional application No. 61/468,616, filed on Mar. 29, 2011.
(60) Provisional application No. 61/478,974, filed on Apr. 26, 2011.

(30) Foreign Application Priority Data
Mar. 1, 2011 (EP) 11156495.1
Mar. 1, 2011 (EP) 11156500.8
Apr. 26, 2011 (EP) 11163740.1
Jul. 1, 2011 (EP) 1117238.1

(51) Int. Cl. C12N 15/82

(52) U.S. Cl. CPC C12N 15/8242
USPC 800/290; 800/298; 435/419; 435/320.1; 800/312; 800/314; 800/306; 800/320.2; 800/320.1; 800/320.3; 800/320; 536/23.6; 530/370

(57) ABSTRACT

Provided is a method for enhancing yield-related traits in plants by modulating expression in a plant of a nucleic acid encoding a TLP (Tify like protein) polypeptide, a PMP22 polypeptide (22 kDa peroxisomal membrane like polypeptide), a RTF (REM-like transcription factor) polypeptide, or a BP1 (Bigger plant 1) polypeptide. Also provided are plants having modulated expression of a nucleic acid encoding a TLP, PMP22, RTF or BP1 polypeptide, which plants have enhanced yield-related traits compared to control plants.

[0001] The present application claims priority of the following applications: EP 11 156 500.8 filed on Mar. 1, 2011, U.S. 61/447,811 filed on Mar. 1, 2011, EP 11 156 495.1 filed on Mar. 1, 2011, U.S. 61/447,797 filed on Mar. 1, 2011, U.S. 61/468,676 filed on Mar. 29, 2011, EP 11 163 740.1 filed on Apr. 26, 2011, U.S. 61/478,975 filed on Apr. 26, 2011, and EP 11 172 381.3 filed Jul. 1, 2011 all of which are herewith incorporated by reference with respect to the entire disclosure content.

[0002] The present invention relates generally to the field of molecular biology and concerns a method for enhancing yield-related traits in plants by modulating expression in a plant of a nucleic acid encoding a TLP (Tify like protein) polypeptide, a PMP22 polypeptide (22 kDa peroxisomal membrane like polypeptide), a RTF (REM-like transcription factor) polypeptide, or a BP1 (Bigger plant 1) polypeptide. The present invention also concerns plants having modulated expression of a nucleic acid encoding a TLP, PMP22, RTF or BP1 polypeptide, which plants have enhanced yield-related traits compared to corresponding wild type plants or other control plants. The invention also provides constructs useful in the methods, plants, harvestable parts and products of the invention.

[0003] The ever-increasing world population and the dwindling supply of arable land available for agriculture fuels research towards increasing the efficiency of agriculture. Conventional means for crop and horticultural improvements utilise selective breeding techniques to identify plants having desirable characteristics. However, such selective breeding techniques have several drawbacks, namely that these techniques are typically labour intensive and result in plants that often contain heterogeneous genetic components that may not always result in the desirable trait being passed on from parent plants. Advances in molecular biology have allowed mankind to modify the germplasm of animals and plants. Genetic engineering of plants entails the isolation and manipulation of genetic material (typically in the form of DNA or RNA) and the subsequent introduction of that genetic material into a plant. Such technology has the capacity to deliver crops or plants having various improved economic, agronomic or horticultural traits.

[0004] A trait of particular economic interest is increased yield. Yield is normally defined as the measurable produce of economic value from a crop. This may be defined in terms of quantity and/or quality. Yield is directly dependent on several factors, for example, the number and size of the organs, plant architecture (for example, the number of branches), seed production, leaf senescence and more. Root development, nutrient uptake, stress tolerance and early vigour may also be important factors in determining yield. Optimizing the abovementioned factors may therefore contribute to increasing crop yield.

[0005] Seed yield is a particularly important trait, since the seeds of many plants are important for human and animal nutrition. Crops such as corn, rice, wheat, canola and soybean account for over half the total human caloric intake, whether through direct consumption of the seeds themselves or through consumption of meat products raised on processed seeds. They are also a source of sugars, oils and many kinds of metabolites used in industrial processes. Seeds contain an embryo (the source of new shoots and roots) and an endosperm (the source of nutrients for embryo growth during germination and during early growth of seedlings). The development of a seed involves many genes, and requires the transfer of metabolites from the roots, leaves and stems into the growing seed. The endosperm, in particular, assimilates the metabolic precursors of carbohydrates, oils and proteins and synthesizes them into storage macromolecules to fill out the grain.

[0006] Another important trait for many crops is early vigour. Improving early vigour is an important objective of modern rice breeding programs in both temperate and tropical rice cultivars. Long roots are important for proper soil anchorage in water-seeded rice. Where rice is sown directly into flooded fields, and where plants must emerge rapidly through water, longer shoots are associated with vigour. Where drill-seeding is practiced, longer mesocotyls and coleoptiles are important for good seedling emergence. The ability to engineer early vigour into plants would be of great importance in agriculture. For example, poor early vigour has been a limitation to the introduction of maize (Zea mays L.) hybrids based on Corn Belt germplasm in the European Atlantic.

[0007] A further important trait is that of improved abiotic stress tolerance. Abiotic stress is a primary cause of crop loss worldwide, reducing average yields for most major crop plants by more than 50% (Wang et al., Planta 218, 1-14, 2003). Abiotic stresses may be caused by drought, salinity, extremes of temperature, chemical toxicity and oxidative stress. The ability to improve plant tolerance to abiotic stress would be of great economic advantage to farmers worldwide and would allow for the cultivation of crops during adverse conditions and in territories where cultivation of crops may not otherwise be possible.

[0008] Crop yield may therefore be increased by optimising one of the above-mentioned factors.

[0009] Depending on the end use, the modification of certain yield traits may be favoured over others. For example for applications such as forage or wood production, or bio-fuel resource, an increase in the vegetative parts of a plant may be desirable, and for applications such as flour, starch or oil production, an increase in seed parameters may be particularly desirable. Even amongst the seed parameters, some may be favoured over others, depending on the application. Various mechanisms may contribute to increasing seed yield, whether that is in the form of increased seed size or increased seed number.

[0010] It has now been found that various yield-related traits may be improved in plants by modulating expression in a plant of a nucleic acid encoding a TLP (Tify like protein) polypeptide in a plant.

[0011] It further has been found that modulating expression of a nucleic acid encoding a PMP22 polypeptide as defined herein gives plants having enhanced yield-related traits relative to control plants.

[0012] Moreover, it has now been found that various yield-related traits may be improved in plants by modulating expression in a plant of a nucleic acid encoding a RTF (REM-like transcription factor) polypeptide in a plant.

[0013] Finally, it has now been found that various yield-related traits may be improved in plants by modulating expression in a plant of a nucleic acid encoding a BP1 (Bigger plant 1) polypeptide in a plant.

### A. BACKGROUND

### A-1. TLP (Tify Like Protein) Polypeptide

[0014] The TIFY family is a novel plant-specific gene family involved in the regulation of diverse plant-specific biologic processes, such as development and responses to phytohormones, in Arabidopsis (Ye et al., Plant Mol Biol. 2009, 71(3)291-305). The function of the TIFY proteins in not fully understood, however it has been proposed that TIFY proteins are transcription factor (see Vanholme et al., Trends Plant Sci. 2007 12(6):239-44), Ye et al. (loc. cit.) reported that there are 20 TIFY genes in rice, the model monocot species. Sequence analysis indicated that rice TIFY proteins have conserved motifs beyond the TIFY domain as was previously shown in Arabidopsis. Most of the OsTIFY genes were predominantly expressed in leaf. Nine OsTIFY genes were responsive to jasmonic acid and wounding treatments. Almost, all the OsTIFY genes were responsive to one or more abiotic stresses including drought, salinity, and low temperature. Moreover, it is also assumed that TIFY proteins might be involved in developmental processes (see Vanholme et al., loc. cit.).

[0015] Surprisingly, it has now been found that modulating expression of a nucleic acid encoding a TLP polypeptide as defined herein gives plants having enhanced yield-related traits, in particular increased biomass and/or increased seed yield relative to control plants.

[0016] According one embodiment, there is provided a method for improving yield-related traits as provided herein in plants relative to control plants, comprising modulating expression in a plant of a nucleic acid encoding a TLP polypeptide as defined herein.

### A-2. PMP22 Polypeptide (22 kDa Peroxisomal Membrane Like Polypeptide)

[0017] 22 kDa Peroxisomal membrane proteins are major components of the peroxisome membranes. In humans, members of in this family are involved in the pore-forming activity and may contribute to the organelle membrane permeability. Mpv17 is a closely related peroxisomal protein involved in the development of early-onset glomerulosclerosis. In Saccharomyces cerevisiae (Baker's yeast), a member of this family was identified as an integral membrane protein of the inner mitochondrial membrane and suggested to play a role in mitochondrial function during heat shock. They are targeted to the peroxisome by specific targeting peptides. In plants, direct sorting to peroxisome without ER transit has been shown (Murphy et al. (2003). Plant Physiology 133:813-828. Characterization of the Targeting Signal of the Arabidopsis 22-kD Integral Peroxisomal Membrane Protein).

[0018] Peroxisomes play multiple roles at various stages of plant development. For example, they are known to participate in seed germination, leaf senescence, fruit maturation, response to abiotic and biotic stress, photomorphogenesis, biosynthesis of the plant hormones jasmonic acid and auxin, and in cell signaling by reactive oxygen and nitrogen species (ROS and RNS, respectively) (Baker et al. (2010). Biochem Soc Trans. 38(3):807-16. Peroxisome biogenesis and positioning, Del R10 (2010). Arch Biochem Biophys. November 3 (epub ahead of print) Peroxisomes as a cellular source of reactive nitrogen species signal molecules.). It becomes apparent that a peroxisome can be a source and sensor of molecules that can affect plant growth and development. Furthermore, biochemical and molecular studies have shown that multiple essential metabolic functions take place in the peroxisomes (e.g. Eubel et al. (2008). Plant Physiology 148:1809-1829. Novel Proteins, Putative Membrane Transporters, and an Integrated Metabolic Network Are Revealed by Quantitative Proteomic Analysis of Arabidopsis Cell Culture Peroxisomes; Reumann et al. (2009). Plant Physiology 150:125-143. In-Depth Proteome Analysis of Arabidopsis Leaf Peroxisomes Combined with in Vivo Subcellular Targeting Verification Indicates Novel Metabolic and Regulatory Functions of Peroxisomes.). These processes rely on several transport systems supporting the flux of metabolites in and out of the peroxisomes (for review see Visset et al. (2007). Biochem J. 401(2):365-75. Metabolite transport across the peroxisomal membrane.).

[0019] Peroxisomes play an important role in plant productivity as it is intimately involved in photorespiratory pathway, along with the chloroplast and mitochondria (for review see Peterhansel and Maurino (2011). Plant Physiol. 155:49-55. Photorespiration redesigned.). Interestingly, Arabidopsis plants with low photorespiration showed enhanced photosynthesis and growth. This effect was mainly driven by high catalase activity, but unfortunately it could not be stabilized over generations.

[0020] Surprisingly, it has now been found that modulating expression of a nucleic acid encoding a PMP22 polypeptide as defined herein gives plants having enhanced yield-related traits, in particular increased yield relative to control plants.

[0021] According one embodiment, there is provided a method for improving yield-related traits as provided herein in plants relative to control plants, comprising modulating expression in a plant of a nucleic acid encoding a PMP22 polypeptide as defined herein.

### A-3. RTF (REM-Like Transcription Factor) Polypeptide

[0022] The B3 DNA binding domain is a conserved domain which is only found in transcription factors from higher plants. A B3 binding domain usually consists of 100-120 residues, and includes seven beta strands and two alpha helices which form a DNA-binding pseudobarrel protein fold which is thought to interact with the major groove of the DNA. Five different protein families were shown to comprise B3 domains: auxin response factor (ARF), abscisic acid-insensitive3 (ABI3), high level expression of sugar inducible (HSI), related to ABI3/VP1 (RAV) and reproductive meristem (REM). Among the B3 families, ABI3, HSI, RAV and ARF are most structurally conserved, whereas the REM family has experienced a rapid divergence. This explains the variety of sequences found in the REM subgroup and the variety observed between plant species (Romanel E A, Schrago C G, Counago R M, Russo C A, Alves-Ferreira M. (2009). Evolution of the B3 DNA binding superfamily: new insights into REM family gene diversification. PLoS One. 2009 Jun. 8; 4(6):e5791).

[0023] Swaminathan et al. (Swaminathan K, Peterson K, Jack T. 2008. The plant B3 superfamily. Trends Plant Sci. 2008 December; 13(12):647-55) provides an overview on REM genes in Arabidopsis. According to Swaminathan, there are a total of 76 REM genes in Arabidopsis which can be divided into six subgroups, subgroups A to F.

[0024] REM10 (At2G24700) belongs to subgroup C according to the classification of Swaminathan. Subgroup C consists of 18 members (REM1 to REM18) of which REM1 to REM14 are clustered in the Arabidopsis genome. REM10 to REM14 are tightly linked on the a 35 kb region of chromosome 2.

[0025] The members of the subgroup have the unusual feature that they comprise more than one B3 domain (except for REM18). For example, REM10 comprises four B3 domains. Not much information is available on the function of REM genes belonging to subgroup C. According to Swaminathan, no loss of function mutants have been reported.

[0026] Surprisingly, it has now been found that modulating expression of a nucleic acid encoding a RTF polypeptide as defined herein gives plants having enhanced yield-related traits, in particular increased yield, in particular relative to control plants.

[0027] According one embodiment, there is provided a method for improving yield-related traits as provided herein in plants relative to control plants, comprising modulating expression in a plant of a nucleic acid encoding a RTF polypeptide as defined herein.

### A-4. BP1 (Bigger Plant 1) Polypeptide

[0028] Os09g25410 is a protein expressed in rice. It shows homology to gene that is upregulated after anthesis in wheat (Genbank Accession Number CA611178, Ruuska S A, Lewis D C, Kennedy G, Furbank R T, Jenkins C L, Tabe L M, Large scale transcriptome analysis of the effects of nitrogen nutrition on accumulation of stem carbohydrate reserves in reproductive stage wheat. Plant Mol. Biol. 66: 15-32 (2008). In the prior art, no information regarding the function of this protein is available.

[0029] Surprisingly, it has now been found that modulating expression of a nucleic acid encoding a BP1 polypeptide as defined herein gives plants having enhanced yield-related traits, in particular increased yield relative to control plants.

[0030] According one embodiment, there is provided a method for improving yield-related traits as provided herein in plants relative to control plants, comprising modulating expression in a plant of a nucleic acid encoding a BP1 polypeptide as defined herein.

[0031] The section captions and headings in this specification are for convenience and reference purpose only and should not affect in any way the meaning or interpretation of this specification.

### B. DEFINITIONS

[0032] The following definitions will be used throughout the present specification.

### Polypeptide(s)/Protein(s)

[0033] The terms “polypeptide” and “protein” are used interchangeably herein and refer to amino acids in a polymeric form of any length, linked together by peptide bonds.

### Polynucleotide(s)/Nucleic Acid(s)/Nucleic Acid Sequence(s)/Nucleotide Sequence(s)

[0034] The terms “polynucleotide(s)”, “nucleic acid sequence(s)”, “nucleotide sequence(s)”, “nucleic acid(s)”, “nucleic acid molecule” are used interchangeably herein and refer to nucleotides, either ribonucleotides or deoxyribonucleotides or a combination of both, in a polymeric unbranched form of any length.

### Homologue(s)

[0035] “Homologues” of a protein encompass peptides, oligopeptides, polypeptides, proteins and enzymes having amino acid substitutions, deletions and/or insertions relative to the unmodified protein in question and having similar biological and functional activity as the unmodified protein from which they are derived.

[0036] A deletion refers to removal of one or more amino acids from a protein.

[0037] An insertion refers to one or more amino acid residues being introduced into a predetermined site in a protein. Insertions may comprise N-terminal and/or C-terminal fusions as well as intrasequence insertions of single or multiple amino acids. Generally, insertions within the amino acid sequence will be smaller than N- or C-terminal fusions, of the order of about 1 to 10 residues. Examples of N- or C-terminal fusion proteins or peptides include the binding domain or activation domain of a transcriptional activator as used in the yeast two-hybrid system, phage coat proteins, (histidine)-6-tag, glutathione S-transferase-tag, protein A, maltose-binding protein, dihydrofolate reductase, Tag•100 epitope, c-myc epitope, FLAG®-epitope, lacZ, CMP (calmodulin-binding peptide), HA epitope, protein C epitope and VSV epitope.

[0038] A substitution refers to replacement of amino acids of the protein with other amino acids having similar properties (such as similar hydrophobicity, hydrophilicity, antigenicity, propensity to form or break α-helical structures or β-sheet structures). Amino acid substitutions are typically of single residues, but may be clustered depending upon functional constraints placed upon the polypeptide and may range from 1 to 10 amino acids; insertions will usually be of the order of about 1 to 10 amino acid residues. The amino acid substitutions are preferably conservative amino acid substitutions. Conservative substitution tables are well known in the art (see for example Creighton (1984) Proteins. W.H. Freeman and Company (Eds) and Table 1 below).

TABLE 1
Examples of conserved amino acid substitutions

| | Conservative | | Conservative |
|---|---|---|---|
| Residue | Substitutions | Residue | Substitutions |
| Ala | Ser | Leu | Ile; Val |
| Arg | Lys | Lys | Arg; Gln |
| Asn | Gln; His | Met | Leu; Ile |
| Asp | Glu | Phe | Met; Leu; Tyr |
| Gln | Asn | Ser | Thr; Gly |
| Cys | Ser | Thr | Ser; Val |
| Glu | Asp | Trp | Tyr |
| Gly | Pro | Tyr | Trp; Phe |
| His | Asn; Gln | Val | Ile; Leu |
| Ile | Leu, Val | | |

[0039] Amino acid substitutions, deletions and/or insertions may readily be made using peptide synthetic techniques well known in the art, such as solid phase peptide synthesis and the like, or by recombinant DNA manipulation. Methods for the manipulation of DNA sequences to produce substitution, insertion or deletion variants of a protein are well known in the art. For example, techniques for making substitution mutations at predetermined sites in DNA are well known to those skilled in the art and include M13 mutagenesis, T7-Gen in vitro mutagenesis (USB, Cleveland, Ohio), QuickChange Site Directed mutagenesis (Stratagene, San Diego, Calif.), PCR-mediated site-directed mutagenesis or other site-directed mutagenesis protocols.

### Derivatives

[0040] “Derivatives” include peptides, oligopeptides, polypeptides which may, compared to the amino acid sequence of the naturally-occurring form of the protein, such as the protein of interest, comprise substitutions of amino acids with non-naturally occurring amino acid residues, or additions of non-naturally occurring amino acid residues. “Derivatives” of a protein also encompass peptides, oligopeptides, polypeptides which comprise naturally occurring altered (glycosylated, acylated, prenylated, phosphorylated, myristoylated, sulphated etc.) or non-naturally altered amino acid residues compared to the amino acid sequence of a naturally-occurring form of the polypeptide. A derivative may also comprise one or more non-amino acid substituents or additions compared to the amino acid sequence from which it is derived, for example a reporter molecule or other ligand, covalently or non-covalently bound to the amino acid sequence, such as a reporter molecule which is bound to facilitate its detection, and non-naturally occurring amino acid residues relative to the amino acid sequence of a naturally-occurring protein. Furthermore, “derivatives” also include fusions of the naturally-occurring form of the protein with tagging peptides such as FLAG, HIS6 or thioredoxin (for a review of tagging peptides, see Terpe, Appl. Microbiol. Biotechnol. 60, 523-533, 2003).

### Orthologue(s)/Paralogue(s)

[0041] Orthologues and paralogues encompass evolutionary concepts used to describe the ancestral relationships of genes. Paralogues are genes within the same species that have originated through duplication of an ancestral gene; orthologues are genes from different organisms that have originated through speciation, and are also derived from a common ancestral gene.

### Domain, Motif/Consensus Sequence/Signature

[0042] The term “domain” refers to a set of amino acids conserved at specific positions along an alignment of sequences of evolutionarily related proteins. While amino acids at other positions can vary between homologues, amino acids that are highly conserved at specific positions indicate amino acids that are likely essential in the structure, stability or function of a protein. Identified by their high degree of conservation in aligned sequences of a family of protein homologues, they can be used as identifiers to determine if any polypeptide in question belongs to a previously identified polypeptide family.

[0043] The term “motif” or “consensus sequence” or “signature” refers to a short conserved region in the sequence of evolutionarily related proteins. Motifs are frequently highly conserved parts of domains, but may also include only part of the domain, or be located outside of conserved domain (if all of the amino acids of the motif fall outside of a defined domain).

[0044] Specialist databases exist for the identification of domains, for example, SMART (Schultz et al. (1998) Proc. Natl. Acad. Sci. USA 95, 5857-5864; Letunic et al. (2002) Nucleic Acids Res 30, 242-244), InterPro (Mulder et al., (2003) Nucl. Acids. Res. 31, 315-318), Prosite (Bucher and Bairoch (1994), A generalized profile syntax for biomolecular sequences motifs and its function in automatic sequence interpretation. (In) ISMB-94; Proceedings 2nd International Conference on Intelligent Systems for Molecular Biology. Altman R., Brutlag D., Karp P., Lathrop R., Searls D., Eds., pp 53-61, AAAI Press, Menlo Park; Hulo et al., Nucl. Acids. Res. 32:D134-D137, (2004)), or Pfam (Bateman et al., Nucleic Acids Research 30(1): 276-280 (2002) & The Pfam protein families database: R. D. Finn, J. Mistry, J. Tate, P. Coggill, A. Heger, J. E. Pollington, O. L. Gavin, P. Gunesekaran, G. Ceric, K. Forslund, L. Holm, E. L. Sonnhammer, S. R. Eddy, A. Bateman Nucleic Acids Research (2010) Database Issue 38:211-222). A set of tools for in silico analysis of protein sequences is available on the ExPASy proteomics server (Swiss Institute of Bioinformatics (Gasteiger et al., ExPASy: the proteomics server for in-depth protein knowledge and analysis, Nucleic Acids Res. 31:3784-3788 (2003)). Domains or motifs may also be identified using routine techniques, such as by sequence alignment.

[0045] Methods for the alignment of sequences for comparison are well known in the art, such methods include GAP, BESTFIT, BLAST, FASTA and TFASTA. GAP uses the algorithm of Needleman and Wunsch ((1970) J Mol Biol 48: 443-453) to find the global (i.e. spanning the complete sequences) alignment of two sequences that maximizes the number of matches and minimizes the number of gaps. The BLAST algorithm (Altschul et al. (1990) J Mol Biol 215: 403-10) calculates percent sequence identity and performs a statistical analysis of the similarity between the two sequences. The software for performing BLAST analysis is publicly available through the National Centre for Biotechnology Information (NCBI). Homologues may readily be identified using, for example, the ClustalW multiple sequence alignment algorithm (version 1.83), with the default pairwise alignment parameters, and a scoring method in percentage. Global percentages of similarity and identity may also be determined using one of the methods available in the MatGAT software package (Campanella et al., BMC Bioinformatics. 2003 Jul. 10; 4:29. MatGAT: an application that generates similarity/identity matrices using protein or DNA sequences.). Minor manual editing may be performed to optimise alignment between conserved motifs, as would be apparent to a person skilled in the art. Furthermore, instead of using full-length sequences for the identification of homologues, specific domains may also be used. The sequence identity values may be determined over the entire nucleic acid or amino acid sequence or over selected domains or conserved motif(s), using the programs mentioned above using the default parameters. For local alignments, the Smith-Waterman algorithm is particularly useful (Smith T F, Waterman M S (1981) J. Mol. Biol 147(1); 195-7).

### Reciprocal BLAST

[0046] Typically, this involves a first BLAST involving BLASTing a query sequence (for example using any of the sequences listed in Table A1 of the Examples section) against any sequence database, such as the publicly available NCBI database. BLASTN or TBLASTX (using standard default values) are generally used when starting from a nucleotide sequence, and BLASTP or TBLASTN (using standard default values) when starting from a protein sequence. The BLAST results may optionally be filtered. The full-length sequences of either the filtered results or non-filtered results are then BLASTed back (second BLAST) against sequences from the organism from which the query sequence is derived. The results of the first and second BLASTs are then compared. A paralogue is identified if a high-ranking hit from the first blast is from the same species as from which the query sequence is derived, a BLAST back then ideally results in the query sequence amongst the highest hits; an orthologue is identified if a high-ranking hit in the first BLAST is not from the same species as from which the query sequence is derived, and preferably results upon BLAST back in the query sequence being among the highest hits.

[0047] High-ranking hits are those having a low E-value. The lower the E-value, the more significant the score (or in other words the lower the chance that the hit was found by chance). Computation of the E-value is well known in the art. In addition to E-values, comparisons are also scored by percentage identity. Percentage identity refers to the number of identical nucleotides (or amino acids) between the two compared nucleic acid (or polypeptide) sequences over a particular length. In the case of large families, ClustalW may be used, followed by a neighbour joining tree, to help visualize clustering of related genes and to identify orthologues and paralogues.

### Hybridisation

[0048] The term “hybridisation” as defined herein is a process wherein substantially homologous complementary nucleotide sequences anneal to each other. The hybridisation process can occur entirely in solution, i.e. both complementary nucleic acids are in solution. The hybridisation process can also occur with one of the complementary nucleic acids immobilised to a matrix such as magnetic beads, Sepharose beads or any other resin. The hybridisation process can furthermore occur with one of the complementary nucleic acids immobilised to a solid support such as a nitro-cellulose or nylon membrane or immobilised by e.g. photolithography to, for example, a siliceous glass support (the latter known as nucleic acid arrays or microarrays or as nucleic acid chips). In order to allow hybridisation to occur, the nucleic acid molecules are generally thermally or chemically denatured to melt a double strand into two single strands and/or to remove hairpins or other secondary structures from single stranded nucleic acids.

[0049] The term “stringency” refers to the conditions under which a hybridisation takes place. The stringency of hybridisation is influenced by conditions such as temperature, salt concentration, ionic strength and hybridisation buffer composition. Generally, low stringency conditions are selected to be about 30° C. lower than the thermal melting Point (Tₘ) for the specific sequence at a defined ionic strength and pH. Medium stringency conditions are when the temperature is 20° C. below Tₘ, and high stringency conditions are when the temperature is 10° C. below Tₘ.

[0050] High stringency hybridisation conditions are typically used for isolating hybridising sequences that have high sequence similarity to the target nucleic acid sequence. However, nucleic acids may deviate in sequence and still encode a substantially identical polypeptide, due to the degeneracy of the genetic code. Therefore medium stringency hybridisation conditions may sometimes be needed to identify such nucleic acid molecules.

[0051] The Tₘ is the temperature under defined ionic strength and pH, at which 50% of the target sequence hybridises to a perfectly matched probe. The Tₘ is dependent upon the solution conditions and the base composition and length of the probe. For example, longer sequences hybridise specifically at higher temperatures. The maximum rate of hybridisation is obtained from about 16° C. up to 32° C. below Tₘ. The presence of monovalent cations in the hybridisation solution reduce the electrostatic repulsion between the two nucleic acid strands thereby promoting hybrid formation; this effect is visible for sodium concentrations of up to 0.4M (for higher concentrations, this effect may be ignored). Formamide reduces the melting temperature of DNA-DNA and DNA-RNA duplexes with 0.6 to 0.7° C. for each percent formamide, and addition of 50% formamide allows hybridisation to be performed at 30 to 45° C., though the rate of hybridisation will be lowered. Base pair mismatches reduce the hybridisation rate and the thermal stability of the duplexes. On average and for large probes, the Tₘ decreases about 1° C. per % base mismatch. The Tₘ may be calculated using the following equations, depending on the types of hybrids:

1) DNA-DNA hybrids (Meinkoth and Wahl, Anal. Biochem., 138: 267-284, 1984):

Tₘ=81.5° C.+16.6×log₁₀[Na⁺]^{a}+0.41×%[G/C^{b}]−500×[L^{c}]⁻¹−0.61×% formamide

^{a} or for other monovalent cation, but only accurate in the 0.01-0.4 M range.^{b} only accurate for % GC in the 30% to 75% range.^{c} L=length of duplex in base pairs.
2) DNA-RNA or RNA-RNA hybrids:

Tₘ=79.8° C.+18.5(log₁₀[Na⁺]^{a})+0.58(% G/C^{b})+11.8(% G/C^{b})²−820/L^{c}

3) oligo-DNA or oligo-RNA^{d} hybrids: ^{d} oligo, oligonucleotide; Iₙ,=effective length of primer=2×(no. of G/C)+(no. of NT).

For <20 nucleotides: Tₘ=2(Iₙ)

For 20-35 nucleotides: Tₘ=22+1.46(Iₙ)

[0052] Non-specific binding may be controlled using any one of a number of known techniques such as, for example, blocking the membrane with protein containing solutions, additions of heterologous RNA, DNA, and SDS to the hybridisation buffer, and treatment with Rnase. For non-homologous probes, a series of hybridizations may be performed by varying one of (i) progressively lowering the annealing temperature (for example from 68° C. to 42° C.) or (ii) progressively lowering the formamide concentration (for example from 50% to 0%). The skilled artisan is aware of various parameters which may be altered during hybridisation and which will either maintain or change the stringency conditions.

[0053] Besides the hybridisation conditions, specificity of hybridisation typically also depends on the function of post-hybridisation washes. To remove background resulting from non-specific hybridisation, samples are washed with dilute salt solutions. Critical factors of such washes include the ionic strength and temperature of the final wash solution: the lower the salt concentration and the higher the wash temperature, the higher the stringency of the wash. Wash conditions are typically performed at or below hybridisation stringency. A positive hybridisation gives a signal that is at least twice of that of the background. Generally, suitable stringent conditions for nucleic acid hybridisation assays or gene amplification detection procedures are as set forth above. More or less stringent conditions may also be selected. The skilled artisan is aware of various parameters which may be altered during washing and which will either maintain or change the stringency conditions.

[0054] For example, typical high stringency hybridisation conditions for DNA hybrids longer than 50 nucleotides encompass hybridisation at 65° C. in 1×SSC or at 42° C. in 1×SSC and 50% form amide, followed by washing at 65° C. in 0.3×SSC. If high strigency hybridization conditions are applied, the hybridization may be also followed by washing at 65° C. in 0.1×SSC. Examples of medium stringency hybridisation conditions for DNA hybrids longer than 50 nucleotides encompass hybridisation at 50° C. in 4×SSC or at 40° C. in 6×SSC and 50% formamide, followed by washing at 50° C. in 2×SSC. The length of the hybrid is the anticipated length for the hybridising nucleic acid. Preferably, the solution used for hybridization and washing also comprises 0.1% SDS. When nucleic acids of known sequence are hybridised, the hybrid length may be determined by aligning the sequences and identifying the conserved regions described herein. 1×SSC is 0.15M NaCl and 15 mM sodium citrate; the hybridisation solution and wash solutions may additionally include 5×Denhardt's reagent, 0.5-1.0% SDS, 100 μg/ml denatured, fragmented salmon sperm DNA, 0.5% sodium pyrophosphate.

[0055] For the purposes of defining the level of stringency, reference can be made to Sambrook et al. (2001) Molecular Cloning: a laboratory manual, 3rd Edition, Cold Spring Harbor Laboratory Press, CSH, New York or to Current Protocols in Molecular Biology, John Wiley & Sons, N.Y. (1989 and yearly updates).

### Splice Variant

[0056] The term “splice variant” as used herein encompasses variants of a nucleic acid sequence in which selected introns and/or exons have been excised, replaced, displaced or added, or in which introns have been shortened or lengthened. Such variants will be ones in which the biological activity of the protein is substantially retained; this may be achieved by selectively retaining functional segments of the protein. Such splice variants may be found in nature or may be manmade. Methods for predicting and isolating such splice variants are well known in the art (see for example Foissac and Schiex (2005) BMC Bioinformatics 6: 25).

### Allelic Variant

[0057] Alleles or allelic variants are alternative forms of a given gene, located at the same chromosomal position. Allelic variants encompass Single Nucleotide Polymorphisms (SNPs), as well as Small Insertion/Deletion Polymorphisms (INDELs). The size of INDELs is usually less than 100 bp. SNPs and INDELs form the largest set of sequence variants in naturally occurring polymorphic strains of most organisms.

### Endogenous Gene

[0058] Reference herein to an “endogenous” gene not only refers to the gene in question as found in a plant in its natural form (i.e., without there being any human intervention), but also refers to that same gene (or a substantially homologous nucleic acid/gene) in an isolated form subsequently (re)introduced into a plant (a transgene). For example, a transgenic plant containing such a transgene may encounter a substantial reduction of the transgene expression and/or substantial reduction of expression of the endogenous gene. The isolated gene may be isolated from an organism or may be manmade, for example by chemical synthesis.

### Gene Shuffling/Directed Evolution

[0059] Gene shuffling or directed evolution consists of iterations of DNA shuffling followed by appropriate screening and/or selection to generate variants of nucleic acids or portions thereof encoding proteins having a modified biological activity (Castle et al., (2004) Science 304(5674): 1151-4; U.S. Pat. Nos. 5,811,238 and 6,395,547).

### Construct

[0060] Additional regulatory elements may include transcriptional as well as translational enhancers. Those skilled in the art will be aware of terminator and enhancer sequences that may be suitable for use in performing the invention. An intron sequence may also be added to the 5′ untranslated region (UTR) or in the coding sequence to increase the amount of the mature message that accumulates in the cytosol, as described in the definitions section. Other control sequences (besides promoter, enhancer, silencer, intron sequences, 3′UTR and/or 5′UTR regions) may be protein and/or RNA stabilizing elements. Such sequences would be known or may readily be obtained by a person skilled in the art.

[0061] The genetic constructs of the invention may further include an origin of replication sequence that is required for maintenance and/or replication in a specific cell type. One example is when a genetic construct is required to be maintained in a bacterial cell as an episomal genetic element (e.g. plasmid or cosmid molecule). Preferred origins of replication include, but are not limited to, the f1-ori and colE1.

[0062] For the detection of the successful transfer of the nucleic acid sequences as used in the methods of the invention and/or selection of transgenic plants comprising these nucleic acids, it is advantageous to use marker genes (or reporter genes). Therefore, the genetic construct may optionally comprise a selectable marker gene. Selectable markers are described in more detail in the “definitions” section herein. The marker genes may be removed or excised from the transgenic cell once they are no longer needed. Techniques for marker removal are known in the art, useful techniques are described above in the definitions section.

### Regulatory Element/Control Sequence/Promoter

[0063] The terms “regulatory element”, “control sequence” and “promoter” are all used interchangeably herein and are to be taken in a broad context to refer to regulatory nucleic acid sequences capable of effecting expression of the sequences to which they are ligated. The term “promoter” typically refers to a nucleic acid control sequence located upstream from the transcriptional start of a gene and which is involved in recognising and binding of RNA polymerase and other proteins, thereby directing transcription of an operably linked nucleic acid. Encompassed by the aforementioned terms are transcriptional regulatory sequences derived from a classical eukaryotic genomic gene (including the TATA box which is required for accurate transcription initiation, with or without a CCAAT box sequence) and additional regulatory elements (i.e. upstream activating sequences, enhancers and silencers) which alter gene expression in response to developmental and/or external stimuli, or in a tissue-specific manner. Also included within the term is a transcriptional regulatory sequence of a classical prokaryotic gene, in which case it may include a −35 box sequence and/or −10 box transcriptional regulatory sequences. The term “regulatory element” also encompasses a synthetic fusion molecule or derivative that confers, activates or enhances expression of a nucleic acid molecule in a cell, tissue or organ.

[0064] A “plant promoter” comprises regulatory elements, which mediate the expression of a coding sequence segment in plant cells. Accordingly, a plant promoter need not be of plant origin, but may originate from viruses or micro-organisms, for example from viruses which attack plant cells. The “plant promoter” can also originate from a plant cell, e.g. from the plant which is transformed with the nucleic acid sequence to be expressed in the inventive process and described herein. This also applies to other “plant” regulatory signals, such as “plant” terminators. The promoters upstream of the nucleotide sequences useful in the methods of the present invention can be modified by one or more nucleotide substitution(s), insertion(s) and/or deletion(s) without interfering with the functionality or activity of either the promoters, the open reading frame (ORF) or the 3′-regulatory region such as terminators or other 3′ regulatory regions which are located away from the ORF. It is furthermore possible that the activity of the promoters is increased by modification of their sequence, or that they are replaced completely by more active promoters, even promoters from heterologous organisms. For expression in plants, the nucleic acid molecule must, as described above, be linked operably to or comprise a suitable promoter which expresses the gene at the right Point in time and with the required spatial expression pattern.

[0065] For the identification of functionally equivalent promoters, the promoter strength and/or expression pattern of a candidate promoter may be analysed for example by operably linking the promoter to a reporter gene and assaying the expression level and pattern of the reporter gene in various tissues of the plant. Suitable well-known reporter genes include for example beta-glucuronidase or beta-galactosidase. The promoter activity is assayed by measuring the enzymatic activity of the beta-glucuronidase or beta-galactosidase. The promoter strength and/or expression pattern may then be compared to that of a reference promoter (such as the one used in the methods of the present invention). Alternatively, promoter strength may be assayed by quantifying mRNA levels or by comparing mRNA levels of the nucleic acid used in the methods of the present invention, with mRNA levels of housekeeping genes such as 18S rRNA, using methods known in the art, such as Northern blotting with densitometric analysis of autoradiograms, quantitative real-time PCR or RT-PCR (Heid et al., 1996 Genome Methods 6: 986-994). Generally by “weak promoter” is intended a promoter that drives expression of a coding sequence at a low level. By “low level” is intended at levels of about 1/10,000 transcripts to about 1/100,000 transcripts, to about 1/500,0000 transcripts per cell. Conversely, a “strong promoter” drives expression of a coding sequence at high level, or at about 1/10 transcripts to about 1/100 transcripts to about 1/1000 transcripts per cell. Generally, by “medium strength promoter” is intended a promoter that drives expression of a coding sequence at a lower level than a strong promoter, in particular at a level that is in all instances below that obtained when under the control of a 35S CaMV promoter.

### Operably Linked

[0066] The term “operably linked” as used herein refers to a functional linkage between the promoter sequence and the gene of interest, such that the promoter sequence is able to initiate transcription of the gene of interest.

### Constitutive Promoter

[0067] A “constitutive promoter” refers to a promoter that is transcriptionally active during most, but not necessarily all, phases of growth and development and under most environmental conditions, in at least one cell, tissue or organ. Table 2a below gives examples of constitutive promoters.

TABLE 2a
Examples of constitutive promoters

| Gene Source | Reference |
|---|---|
| Actin | McElroy et al, Plant Cell, 2: 163-171, 1990 |
| HMGP | WO 2004/070039 |
| CAMV 35S | Odell et al, Nature, 313: 810-812, 1985 |
| CaMV 19S | Nilsson et al., Physiol. Plant. 100: 456-462, 1997 |
| GOS2 | de Pater et al, Plant J Nov; 2(6): 837-44, 1992, |
| | WO 2004/065596 |
| Ubiquitin | Christensen et al, Plant Mol. Biol. 18: 675-689, 1992 |
| Rice cyclophilin | Buchholz et al, Plant Mol Biol. 25(5): 837-43, 1994 |
| Maize H3 histone | Lepetit et al, Mol. Gen. Genet. 231: 276-285, 1992 |
| Alfalfa H3 histone | Wu et al. Plant Mol. Biol. 11: 641-649, 1988 |
| Actin 2 | An et al, Plant J. 10(1); 107-121, 1996 |
| 34S FMV | Sanger et al., Plant. Mol. Biol., 14, 1990: 433-443 |
| Rubisco small | U.S. Pat. No. 4,962,028 |
| subunit | |
| OCS | Leisner (1988) Proc Natl Acad Sci USA 85(5): 2553 |
| SAD1 | Jain et al., Crop Science, 39 (6), 1999: 1696 |
| SAD2 | Jain et al., Crop Science, 39 (6), 1999: 1696 |
| nos | Shaw et al. (1984) Nucleic Acids Res. 12(20): |
| | 7831-7846 |
| V-ATPase | WO 01/14572 |
| Super promoter | WO 95/14098 |
| G-box proteins | WO 94/12015 |

### Ubiquitous Promoter

[0068] A ubiquitous promoter is active in substantially all tissues or cells of an organism.

### Developmentally-Regulated Promoter

[0069] A developmentally-regulated promoter is active during certain developmental stages or in parts of the plant that undergo developmental changes.

### Inducible Promoter

[0070] An inducible promoter has induced or increased transcription initiation in response to a chemical (for a review see Gatz 1997, Annu. Rev. Plant Physiol. Plant Mol. Biol., 48:89-108), environmental or physical stimulus, or may be “stress-inducible”, i.e. activated when a plant is exposed to various stress conditions, or a “pathogen-inducible” i.e. activated when a plant is exposed to exposure to various pathogens.

### Organ-Specific/Tissue-Specific Promoter

[0071] An organ-specific or tissue-specific promoter is one that is capable of preferentially initiating transcription in certain organs or tissues, such as the leaves, roots, seed tissue etc. For example, a “root-specific promoter” is a promoter that is transcriptionally active predominantly in plant roots, substantially to the exclusion of any other parts of a plant, whilst still allowing for any leaky expression in these other plant parts. Promoters able to initiate transcription in certain cells only are referred to herein as “cell-specific”.

[0072] Examples of root-specific promoters are listed in Table 2b below:

TABLE 2b
Examples of root-specific promoters

| Gene Source | Reference |
|---|---|
| RCc3 | Plant Mol Biol. 1995 Jan; 27(2): 237-48 |
| Arabidopsis PHT1 | Koyama et al. J Biosci Bioeng. 2005 Jan; 99(1): 38-42.; Mudge et |
| | al. (2002, Plant J. 31: 341) |
| Medicago phosphate | Xiao et al., 2006, Plant Biol (Stuttg). 2006 Jul; 8(4): 439-49 |
| transporter | |
| Arabidopsis Pyk10 | Nitz et al. (2001) Plant Sci 161(2): 337-346 |
| root-expressible genes | Tingey et al., EMBO J. 6: 1, 1987. |
| tobacco auxin-inducible | Van der Zaal et al., Plant Mol. Biol. 16, 983, 1991. |
| gene | |
| β-tubulin | Oppenheimer, et al., Gene 63: 87, 1988. |
| tobacco root-specific | Conkling, et al., Plant Physiol. 93: 1203, 1990. |
| genes | |
| B. napus G1-3b gene | U.S. Pat. No. 5,401,836 |
| SbPRP1 | Suzuki et al., Plant Mol. Biol. 21: 109-119, 1993. |
| LRX1 | Baumberger et al. 2001, Genes & Dev. 15: 1128 |
| BTG-26 Brassica napus | US 20050044585 |
| LeAMT1 (tomato) | Lauter et al. (1996, PNAS 3: 8139) |
| The LeNRT1-1 (tomato) | Lauter et al. (1996, PNAS 3: 8139) |
| class I patatin gene | Liu et al., Plant Mol. Biol. 17 (6): 1139-1154 |
| (potato) | |
| KDC1 (Daucus carota) | Downey et al. (2000, J. Biol. Chem. 275: 39420) |
| TobRB7 gene | W Song (1997) PhD Thesis, North Carolina State University, |
| | Raleigh, NC USA |
| OsRAB5a (rice) | Wang et al. 2002, Plant Sci. 163: 273 |
| ALF5 (Arabidopsis) | Diener et al. (2001, Plant Cell 13: 1625) |
| NRT2; 1Np (N. | Quesada et al. (1997, Plant Mol. Biol. 34: 265) |
| plumbaginifolia) | |

[0073] A seed-specific promoter is transcriptionally active predominantly in seed tissue, but not necessarily exclusively in seed tissue (in cases of leaky expression). The seed-specific promoter may be active during seed development and/or during germination. The seed specific promoter may be endosperm/aleurone/embryo specific. Examples of seed-specific promoters (endosperm/aleurone/embryo specific) are shown in Table 2c to Table 2f below. Further examples of seed-specific promoters are given in Qing Qu and Takaiwa (Plant Biotechnol. J. 2, 113-125, 2004), which disclosure is incorporated by reference herein as if fully set forth.

TABLE 2c
Examples of seed-specific promoters

| Gene source | Reference |
|---|---|
| seed-specific genes | Simon et al., Plant Mol. Biol. 5: 191, 1985; |
| | Scofield et al., J. Biol. Chem. 262: 12202, 1987.; |
| | Baszczynski et al., Plant Mol. Biol. 14: 633, 1990. |
| Brazil Nut albumin | Pearson et al., Plant Mol. Biol. 18: 235-245, 1992. |
| legumin | Ellis et al., Plant Mol. Biol. 10: 203-214, 1988. |
| glutelin (rice) | Takaiwa et al., Mol. Gen. Genet. 208: 15-22, 1986; |
| | Takaiwa et al., FEBS Letts. 221: 43-47, 1987. |
| zein | Matzke et al Plant Mol Biol, 14(3): 323-32 1990 |
| napA | Stalberg et al, Planta 199: 515-519, 1996. |
| wheat LMW and HMW glutenin- | Mol Gen Genet 216: 81-90, 1989; NAR 17: 461-2, 1989 |
| 1 | |
| wheat SPA | Albani et al, Plant Cell, 9: 171-184, 1997 |
| wheat α, β, γ-gliadins | EMBO J. 3: 1409-15, 1984 |
| barley Itr1 promoter | Diaz et al. (1995) Mol Gen Genet 248(5): 592-8 |
| barley B1, C, D, hordein | Theor Appl Gen 98: 1253-62, 1999; Plant J 4: 343-55, 1993; |
| | Mol Gen Genet 250: 750-60, 1996 |
| barley DOF | Mena et al, The Plant Journal, 116(1): 53-62, 1998 |
| blz2 | EP99106056.7 |
| synthetic promoter | Vicente-Carbajosa et al., Plant J. 13: 629-640, 1998. |
| rice prolamin NRP33 | Wu et al, Plant Cell Physiology 39(8) 885-889, 1998 |
| rice a-globulin Glb-1 | Wu et al, Plant Cell Physiology 39(8) 885-889, 1998 |
| rice OSH1 | Sato et al, Proc. Natl. Acad. Sci. USA, 93: 8117-8122, 1996 |
| rice α-globulin REB/OHP-1 | Nakase et al. Plant Mol. Biol. 33: 513-522, 1997 |
| rice ADP-glucose pyrophos- | Trans Res 6: 157-68, 1997 |
| phorylase | |
| maize ESR gene family | Plant J 12: 235-46, 1997 |
| sorghum α-kafirin | DeRose et al., Plant Mol. Biol 32: 1029-35, 1996 |
| KNOX | Postma-Haarsma et al, Plant Mol. Biol. 39: 257-71, 1999 |
| rice oleosin | Wu et al, J. Biochem. 123: 386, 1998 |
| sunflower oleosin | Cummins et al., Plant Mol. Biol. 19: 873-876, 1992 |
| PRO0117, putative rice 40S | WO 2004/070039 |
| ribosomal protein | |
| PRO0136, rice alanine | unpublished |
| aminotransferase | |
| PRO0147, trypsin inhibitor ITR1 | unpublished |
| (barley) | |
| PRO0151, rice WSI18 | WO 2004/070039 |
| PRO0175, rice RAB21 | WO 2004/070039 |
| PRO005 | WO 2004/070039 |
| PRO0095 | WO 2004/070039 |
| α-amylase (Amy32b) | Lanahan et al, Plant Cell 4: 203-211, 1992; Skriver et al, Proc |
| | Natl Acad Sci USA 88: 7266-7270, 1991 |
| cathepsin β-like gene | Cejudo et al, Plant Mol Biol 20: 849-856, 1992 |
| Barley Ltp2 | Kalla et al., Plant J. 6: 849-60, 1994 |
| Chi26 | Leah et al., Plant J. 4: 579-89, 1994 |
| Maize B-Peru | Selinger et al., Genetics 149; 1125-38, 1998 |

TABLE 2d
examples of endosperm-specific promoters

| Gene source | Reference |
|---|---|
| glutelin (rice) | Takaiwa et al. (1986) Mol Gen Genet 208: 15-22; Takaiwa et al. |
| | (1987) FEBS Letts. 221: 43-47 |
| zein | Matzke et al., (1990) Plant Mol Biol 14(3): 323-32 |
| wheat LMW and HMW | Colot et al. (1989) Mol Gen Genet 216: 81-90, Anderson et al. |
| glutenin-1 | (1989) NAR 17: 461-2 |
| wheat SPA | Albani et al. (1997) Plant Cell 9: 171-184 |
| wheat gliadins | Rafalski et al. (1984) EMBO 3: 1409-15 |
| barley Itr1 promoter | Diaz et al. (1995) Mol Gen Genet 248(5): 592-8 |
| barley B1, C, D, hordein | Cho et al. (1999) Theor Appl Genet 98: 1253-62; Muller et al. |
| | (1993) Plant J 4: 343-55; Sorenson et al. (1996) Mol Gen Genet |
| | 250: 750-60 |
| barley DOF | Mena et al, (1998) Plant J 116(1): 53-62 |
| blz2 | Onate et al. (1999) J Biol Chem 274(14): 9175-82 |
| synthetic promoter | Vicente-Carbajosa et al. (1998) Plant J 13: 629-640 |
| rice prolamin NRP33 | Wu et al, (1998) Plant Cell Physiol 39(8) 885-889 |
| rice globulin Glb-1 | Wu et al. (1998) Plant Cell Physiol 39(8) 885-889 |
| rice globulin REB/OHP-1 | Nakase et al. (1997) Plant Molec Biol 33: 513-522 |
| rice ADP-glucose pyro- | Russell et al. (1997) Trans Res 6: 157-68 |
| phosphorylase | |
| maize ESR gene family | Opsahl-Ferstad et al. (1997) Plant J 12: 235-46 |
| sorghum kafirin | DeRose et al. (1996) Plant Mol Biol 32: 1029-35 |

TABLE 2e
Examples of embryo specific promoters:

| Gene source | Reference |
|---|---|
| rice OSH1 | Sato et al, Proc. Natl. Acad. Sci. USA, 93: 8117-8122, 1996 |
| KNOX | Postma-Haarsma et al, Plant Mol. Biol. 39: 257-71, 1999 |
| PRO0151 | WO 2004/070039 |
| PRO0175 | WO 2004/070039 |
| PRO005 | WO 2004/070039 |
| PRO0095 | WO 2004/070039 |

TABLE 2f
Examples of aleurone-specific promoters:

| Gene source | Reference |
|---|---|
| α-amylase | Lanahan et al, Plant Cell 4: 203-211, 1992; Skriver et al, Proc Natl Acad Sci |
| (Amy32b) | USA 88: 7266-7270, 1991 |
| cathepsin β-like | Cejudo et al, Plant Mol Biol 20: 849-856, 1992 |
| gene | |
| Barley Ltp2 | Kalla et al., Plant J. 6: 849-60, 1994 |
| Chi26 | Leah et al., Plant J. 4: 579-89, 1994 |
| Maize B-Peru | Selinger et al., Genetics 149; 1125-38, 1998 |

[0074] A green tissue-specific promoter as defined herein is a promoter that is transcriptionally active predominantly in green tissue, substantially to the exclusion of any other parts of a plant, whilst still allowing for any leaky expression in these other plant parts.

[0075] Examples of green tissue-specific promoters which may be used to perform the methods of the invention are shown in Table 2g below.

TABLE 2g
Examples of green tissue-specific promoters

| Gene | Expression | Reference |
|---|---|---|
| Maize Orthophosphate dikinase | Leaf specific | Fukavama et al., Plant Physiol. |
| | | November 2001; 127(3): 1136-46 |
| Maize Phosphoenolpyruvate carboxylase | Leaf specific | Kausch et al., Plant Mol Biol. |
| | | January 2001; 45(1): 1-15 |
| Rice Phosphoenolpyruvate carboxylase | Leaf specific | Lin et al., 2004 DNA Seq. August |
| | | 2004; 15(4): 269-76 |
| Rice small subunit Rubisco | Leaf specific | Nomura et al., Plant Mol Biol. |
| | | September 2000; 44(1): 99-106 |
| rice beta expansin EXBP9 | Shoot specific | WO 2004/070039 |
| Pigeonpea small subunit Rubisco | Leaf specific | Panguluri et al., Indian J Exp Biol. |
| | | April 2005; 43(4): 369-72 |
| Pea RBCS3A | Leaf specific | |

[0076] Another example of a tissue-specific promoter is a meristem-specific promoter, which is transcriptionally active predominantly in meristematic tissue, substantially to the exclusion of any other parts of a plant, whilst still allowing for any leaky expression in these other plant parts. Examples of green meristem-specific promoters which may be used to perform the methods of the invention are shown in Table 2h below.

TABLE 2h
Examples of meristem-specific promoters

| Gene source | Expression pattern | Reference |
|---|---|---|
| rice OSH1 | Shoot apical meristem, from | Sato et al. (1996) Proc. |
| | embryo globular stage to | Natl. Acad. Sci. USA, |
| | seedling stage | 93: 8117-8122 |
| Rice metallothionein | Meristem specific | BAD87835.1 |
| WAK1 & WAK 2 | Shoot and root apical meri- | Wagner & Kohorn |
| | stems, and in expanding | (2001) Plant Cell |
| | leaves and sepals | 13(2): 303-318 |

### Terminator

[0077] The term “terminator” encompasses a control sequence which is a DNA sequence at the end of a transcriptional unit which signals 3′ processing and polyadenylation of a primary transcript and termination of transcription. The terminator can be derived from the natural gene, from a variety of other plant genes, or from T-DNA. The terminator to be added may be derived from, for example, the nopaline synthase or octopine synthase genes, or alternatively from another plant gene, or less preferably from any other eukaryotic gene.

### Selectable Marker (Gene)/Reporter Gene

[0078] “Selectable marker”, “selectable marker gene” or “reporter gene” includes any gene that confers a phenotype on a cell in which it is expressed to facilitate the identification and/or selection of cells that are transfected or transformed with a nucleic acid construct of the invention. These marker genes enable the identification of a successful transfer of the nucleic acid molecules via a series of different principles. Suitable markers may be selected from markers that confer antibiotic or herbicide resistance, that introduce a new metabolic trait or that allow visual selection. Examples of selectable marker genes include genes conferring resistance to antibiotics (such as nptII that phosphorylates neomycin and kanamycin, or hpt, phosphorylating hygromycin, or genes conferring resistance to, for example, bleomycin, streptomycin, tetracyclin, chloramphenicol, ampicillin, gentamycin, geneticin (G418), spectinomycin or blasticidin), to herbicides (for example bar which provides resistance to Basta®; aroA or gox providing resistance against glyphosate, or the genes conferring resistance to, for example, imidazolinone, phosphinothricin or sulfonylurea), or genes that provide a metabolic trait (such as manA that allows plants to use mannose as sole carbon source or xylose isomerase for the utilisation of xylose, or antinutritive markers such as the resistance to 2-deoxyglucose). Expression of visual marker genes results in the formation of colour (for example β-glucuronidase, GUS or β-galactosidase with its coloured substrates, for example X-Gal), luminescence (such as the luciferin/luceferase system) or fluorescence (Green Fluorescent Protein, GFP, and derivatives thereof). This list represents only a small number of possible markers. The skilled worker is familiar with such markers. Different markers are preferred, depending on the organism and the selection method.

[0079] It is known that upon stable or transient integration of nucleic acids into plant cells, only a minority of the cells takes up the foreign DNA and, if desired, integrates it into its genome, depending on the expression vector used and the transfection technique used. To identify and select these integrants, a gene coding for a selectable marker (such as the ones described above) is usually introduced into the host cells together with the gene of interest. These markers can for example be used in mutants in which these genes are not functional by, for example, deletion by conventional methods. Furthermore, nucleic acid molecules encoding a selectable marker can be introduced into a host cell on the same vector that comprises the sequence encoding the polypeptides of the invention or used in the methods of the invention, or else in a separate vector. Cells which have been stably transfected with the introduced nucleic acid can be identified for example by selection (for example, cells which have integrated the selectable marker survive whereas the other cells die).

[0080] Since the marker genes, particularly genes for resistance to antibiotics and herbicides, are no longer required or are undesired in the transgenic host cell once the nucleic acids have been introduced successfully, the process according to the invention for introducing the nucleic acids advantageously employs techniques which enable the removal or excision of these marker genes. One such a method is what is known as co-transformation. The co-transformation method employs two vectors simultaneously for the transformation, one vector bearing the nucleic acid according to the invention and a second bearing the marker gene(s). A large proportion of transformants receives or, in the case of plants, comprises (up to 40% or more of the transformants), both vectors. In case of transformation with Agrobacteria, the transformants usually receive only a part of the vector, i.e. the sequence flanked by the T-DNA, which usually represents the expression cassette. The marker genes can subsequently be removed from the transformed plant by performing crosses. In another method, marker genes integrated into a transposon are used for the transformation together with desired nucleic acid (known as the Ac/Ds technology). The transformants can be crossed with a transposase source or the transformants are transformed with a nucleic acid construct conferring expression of a transposase, transiently or stable. In some cases (approx. 10%), the transposon jumps out of the genome of the host cell once transformation has taken place successfully and is lost. In a further number of cases, the transposon jumps to a different location. In these cases the marker gene must be eliminated by performing crosses. In microbiology, techniques were developed which make possible, or facilitate, the detection of such events. A further advantageous method relies on what is known as recombination systems; whose advantage is that elimination by crossing can be dispensed with. The best-known system of this type is what is known as the Cre/lox system. Cre1 is a recombinase that removes the sequences located between the loxP sequences. If the marker gene is integrated between the loxP sequences, it is removed once transformation has taken place successfully, by expression of the recombinase. Further recombination systems are the HIN/HIX, FLP/FRT and REP/STB system (Tribble et al., J. Biol. Chem., 275, 2000: 22255-22267; Velmurugan et al., J. Cell Biol., 149, 2000: 553-566). A site-specific integration into the plant genome of the nucleic acid sequences according to the invention is possible. Naturally, these methods can also be applied to microorganisms such as yeast, fungi or bacteria.

### Transgenic/Transgene/Recombinant

[0081] For the purposes of the invention, “transgenic”, “transgene” or “recombinant” means with regard to, for example, a nucleic acid sequence, an expression cassette, gene construct or a vector comprising the nucleic acid sequence or an organism transformed with the nucleic acid sequences, expression cassettes or vectors according to the invention, all those constructions brought about by recombinant methods in which either

(a) the nucleic acid sequences encoding proteins useful in the methods of the invention, or
(b) genetic control sequence(s) which is operably linked with the nucleic acid sequence according to the invention, for example a promoter, or
(c) a) and b)
are not located in their natural genetic environment or have been modified by recombinant methods, it being possible for the modification to take the form of, for example, a substitution, addition, deletion, inversion or insertion of one or more nucleotide residues. The natural genetic environment is understood as meaning the natural genomic or chromosomal locus in the original plant or the presence in a genomic library. In the case of a genomic library, the natural genetic environment of the nucleic acid sequence is preferably retained, at least in part. The environment flanks the nucleic acid sequence at least on one side and has a sequence length of at least 50 bp, preferably at least 500 bp, especially preferably at least 1000 bp, most preferably at least 5000 bp. A naturally occurring expression cassette—for example the naturally occurring combination of the natural promoter of the nucleic acid sequences with the corresponding nucleic acid sequence encoding a polypeptide useful in the methods of the present invention, as defined above—becomes a transgenic expression cassette when this expression cassette is modified by non-natural, synthetic (“artificial”) methods such as, for example, mutagenic treatment. Suitable methods are described, for example, in U.S. Pat. No. 5,565,350 or WO 00/15815.

[0082] A transgenic plant for the purposes of the invention is thus understood as meaning, as above, that the nucleic acids used in the method of the invention are not present in, or originating from, the genome of said plant, or are present in the genome of said plant but not at their natural locus in the genome of said plant, it being possible for the nucleic acids to be expressed homologously or heterologously. However, as mentioned, transgenic also means that, while the nucleic acids according to the invention or used in the inventive method are at their natural position in the genome of a plant, the sequence has been modified with regard to the natural sequence, and/or that the regulatory sequences of the natural sequences have been modified. Transgenic is preferably understood as meaning the expression of the nucleic acids according to the invention at an unnatural locus in the genome, i.e. homologous or, preferably, heterologous expression of the nucleic acids takes place. Preferred transgenic plants are mentioned herein.

[0083] It shall further be noted that in the context of the present invention, the term “isolated nucleic acid” or “isolated polypeptide” may in some instances be considered as a synonym for a “recombinant nucleic acid” or a “recombinant polypeptide”, respectively and refers to a nucleic acid or polypeptide that is not located in its natural genetic environment and/or that has been modifled by recombinant methods.

[0084] In one embodiment of the invention an “isolated” nucleic acid sequence is located in a non-native chromosomal surrounding.

### Modulation

[0085] The term “modulation” means in relation to expression or gene expression, a process in which the expression level is changed by said gene expression in comparison to the control plant, the expression level may be increased or decreased. The original, unmodulated expression may be of any kind of expression of a structural RNA (rRNA, tRNA) or mRNA with subsequent translation. For the purposes of this invention, the original unmodulated expression may also be absence of any expression. The term “modulating the activity” or the term “modulating expression” shall mean any change of the expression of the inventive nucleic acid sequences or encoded proteins, which leads to increased yield and/or increased growth of the plants. The expression can increase from zero (absence of, or immeasurable expression) to a certain amount, or can decrease from a certain amount to immeasurable small amounts or zero.

### Expression

[0086] The term “expression” or “gene expression” means the transcription of a specific gene or specific genes or specific genetic construct. The term “expression” or “gene expression” in particular means the transcription of a gene or genes or genetic construct into structural RNA (rRNA, tRNA) or mRNA with or without subsequent translation of the latter into a protein. The process includes transcription of DNA and processing of the resulting mRNA product.

### Increased Expression/Overexpression

[0087] The term “increased expression” or “overexpression” as used herein means any form of expression that is additional to the original wild-type expression level. For the purposes of this invention, the original wild-type expression level might also be zero, i.e. absence of expression or immeasurable expression.

[0088] Methods for increasing expression of genes or gene products are well documented in the art and include, for example, overexpression driven by appropriate promoters, the use of transcription enhancers or translation enhancers. Isolated nucleic acids which serve as promoter or enhancer elements may be introduced in an appropriate position (typically upstream) of a non-heterologous form of a polynucleotide so as to upregulate expression of a nucleic acid encoding the polypeptide of interest. For example, endogenous promoters may be altered in vivo by mutation, deletion, and/or substitution (see, Kmiec, U.S. Pat. No. 5,565,350; Zarling et al., WO9322443), or isolated promoters may be introduced into a plant cell in the proper orientation and distance from a gene of the present invention so as to control the expression of the gene.

[0089] If polypeptide expression is desired, it is generally desirable to include a polyadenylation region at the 3′-end of a polynucleotide coding region. The polyadenylation region can be derived from the natural gene, from a variety of other plant genes, or from T-DNA. The 3′ end sequence to be added may be derived from, for example, the nopaline synthase or octopine synthase genes, or alternatively from another plant gene, or less preferably from any other eukaryotic gene.

[0090] An intron sequence may also be added to the 5′ untranslated region (UTR) or the coding sequence of the partial coding sequence to increase the amount of the mature message that accumulates in the cytosol. Inclusion of a spliceable intron in the transcription unit in both plant and animal expression constructs has been shown to increase gene expression at both the mRNA and protein levels up to 1000-fold (Buchman and Berg (1988) Mol. Cell biol. 8: 4395-4405; Callis et al. (1987) Genes Dev 1:1183-1200). Such intron enhancement of gene expression is typically greatest when placed near the 5′ end of the transcription unit. Use of the maize introns Adh1-S intron 1, 2, and 6, the Bronze-1 intron are known in the art. For general information see: The Maize Handbook, Chapter 116, Freeling and Walbot, Eds., Springer, N.Y. (1994).

### Decreased Expression

[0091] Reference herein to “decreased expression” or “reduction or substantial elimination” of expression is taken to mean a decrease in endogenous gene expression and/or polypeptide levels and/or polypeptide activity relative to control plants. The reduction or substantial elimination is in increasing order of preference at least 10%, 20%, 30%, 40% or 50%, 60%, 70%, 80%, 85%, 90%, or 95%, 96%, 97%, 98%, 99% or more reduced compared to that of control plants.

[0092] For the reduction or substantial elimination of expression an endogenous gene in a plant, a sufficient length of substantially contiguous nucleotides of a nucleic acid sequence is required. In order to perform gene silencing, this may be as little as 20, 19, 18, 17, 16, 15, 14, 13, 12, 11, 10 or fewer nucleotides, alternatively this may be as much as the entire gene (including the 5′ and/or 3′ UTR, either in part or in whole). The stretch of substantially contiguous nucleotides may be derived from the nucleic acid encoding the protein of interest (target gene), or from any nucleic acid capable of encoding an orthologue, paralogue or homologue of the protein of interest. Preferably, the stretch of substantially contiguous nucleotides is capable of forming hydrogen bonds with the target gene (either sense or antisense strand), more preferably, the stretch of substantially contiguous nucleotides has, in increasing order of preference, 50%, 60%, 70%, 80%, 85%, 90%, 95%, 96%, 97%, 98%, 99%, 100% sequence identity to the target gene (either sense or antisense strand). A nucleic acid sequence encoding a (functional) polypeptide is not a requirement for the various methods discussed herein for the reduction or substantial elimination of expression of an endogenous gene.

[0093] This reduction or substantial elimination of expression may be achieved using routine tools and techniques. A preferred method for the reduction or substantial elimination of endogenous gene expression is by introducing and expressing in a plant a genetic construct into which the nucleic acid (in this case a stretch of substantially contiguous nucleotides derived from the gene of interest, or from any nucleic acid capable of encoding an orthologue, paralogue or homologue of any one of the protein of interest) is cloned as an inverted repeat (in part or completely), separated by a spacer (non-coding DNA).

[0094] In such a preferred method, expression of the endogenous gene is reduced or substantially eliminated through RNA-mediated silencing using an inverted repeat of a nucleic acid or a part thereof (in this case a stretch of substantially contiguous nucleotides derived from the gene of interest, or from any nucleic acid capable of encoding an orthologue, paralogue or homologue of the protein of interest), preferably capable of forming a hairpin structure. The inverted repeat is cloned in an expression vector comprising control sequences. A non-coding DNA nucleic acid sequence (a spacer, for example a matrix attachment region fragment (MAR), an intron, a polylinker, etc.) is located between the two inverted nucleic acids forming the inverted repeat. After transcription of the inverted repeat, a chimeric RNA with a self-complementary structure is formed (partial or complete). This double-stranded RNA structure is referred to as the hairpin RNA (hpRNA). The hpRNA is processed by the plant into siRNAs that are incorporated into an RNA-induced silencing complex (RISC). The RISC further cleaves the mRNA transcripts, thereby substantially reducing the number of mRNA transcripts to be translated into polypeptides. For further general details see for example, Grierson et al. (1998) WO 98/53083; Waterhouse et al. (1999) WO 99/53050).

[0095] Performance of the methods of the invention does not rely on introducing and expressing in a plant a genetic construct into which the nucleic acid is cloned as an inverted repeat, but any one or more of several well-known “gene silencing” methods may be used to achieve the same effects.

[0096] One such method for the reduction of endogenous gene expression is RNA-mediated silencing of gene expression (downregulation). Silencing in this case is triggered in a plant by a double stranded RNA sequence (dsRNA) that is substantially similar to the target endogenous gene. This dsRNA is further processed by the plant into about 20 to about 26 nucleotides called short interfering RNAs (siRNAs). The siRNAs are incorporated into an RNA-induced silencing complex (RISC) that cleaves the mRNA transcript of the endogenous target gene, thereby substantially reducing the number of mRNA transcripts to be translated into a polypeptide. Preferably, the double stranded RNA sequence corresponds to a target gene.

[0097] Another example of an RNA silencing method involves the introduction of nucleic acid sequences or parts thereof (in this case a stretch of substantially contiguous nucleotides derived from the gene of interest, or from any nucleic acid capable of encoding an orthologue, paralogue or homologue of the protein of interest) in a sense orientation into a plant. “Sense orientation” refers to a DNA sequence that is homologous to an mRNA transcript thereof. Introduced into a plant would therefore be at least one copy of the nucleic acid sequence. The additional nucleic acid sequence will reduce expression of the endogenous gene, giving rise to a phenomenon known as co-suppression. The reduction of gene expression will be more pronounced if several additional copies of a nucleic acid sequence are introduced into the plant, as there is a positive correlation between high transcript levels and the triggering of co-suppression.

[0098] Another example of an RNA silencing method involves the use of antisense nucleic acid sequences. An “antisense” nucleic acid sequence comprises a nucleotide sequence that is complementary to a “sense” nucleic acid sequence encoding a protein, i.e. complementary to the coding strand of a double-stranded cDNA molecule or complementary to an mRNA transcript sequence. The antisense nucleic acid sequence is preferably complementary to the endogenous gene to be silenced. The complementarity may be located in the “coding region” and/or in the “non-coding region” of a gene. The term “coding region” refers to a region of the nucleotide sequence comprising codons that are translated into amino acid residues. The term “non-coding region” refers to 5′ and 3′ sequences that flank the coding region that are transcribed but not translated into amino acids (also referred to as 5′ and 3′ untranslated regions).

[0099] Antisense nucleic acid sequences can be designed according to the rules of Watson and Crick base pairing. The antisense nucleic acid sequence may be complementary to the entire nucleic acid sequence (in this case a stretch of substantially contiguous nucleotides derived from the gene of interest, or from any nucleic acid capable of encoding an orthologue, paralogue or homologue of the protein of interest), but may also be an oligonucleotide that is antisense to only a part of the nucleic acid sequence (including the mRNA 5′ and 3′ UTR). For example, the antisense oligonucleotide sequence may be complementary to the region surrounding the translation start site of an mRNA transcript encoding a polypeptide. The length of a suitable antisense oligonucleotide sequence is known in the art and may start from about 50, 45, 40, 35, 30, 25, 20, 15 or 10 nucleotides in length or less. An antisense nucleic acid sequence according to the invention may be constructed using chemical synthesis and enzymatic ligation reactions using methods known in the art. For example, an antisense nucleic acid sequence (e.g., an antisense oligonucleotide sequence) may be chemically synthesized using naturally occurring nucleotides or variously modified nucleotides designed to increase the biological stability of the molecules or to increase the physical stability of the duplex formed between the antisense and sense nucleic acid sequences, e.g., phosphorothioate derivatives and acridine substituted nucleotides may be used. Examples of modified nucleotides that may be used to generate the antisense nucleic acid sequences are well known in the art. Known nucleotide modifications include methylation, cyclization and ‘caps’ and substitution of one or more of the naturally occurring nucleotides with an analogue such as inosine. Other modifications of nucleotides are well known in the art.

[0100] The antisense nucleic acid sequence can be produced biologically using an expression vector into which a nucleic acid sequence has been subcloned in an antisense orientation (i.e., RNA transcribed from the inserted nucleic acid will be of an antisense orientation to a target nucleic acid of interest). Preferably, production of antisense nucleic acid sequences in plants occurs by means of a stably integrated nucleic acid construct comprising a promoter, an operably linked antisense oligonucleotide, and a terminator.

[0101] The nucleic acid molecules used for silencing in the methods of the invention (whether introduced into a plant or generated in situ) hybridize with or bind to mRNA transcripts and/or genomic DNA encoding a polypeptide to thereby inhibit expression of the protein, e.g., by inhibiting transcription and/or translation. The hybridization can be by conventional nucleotide complementarity to form a stable duplex, or, for example, in the case of an antisense nucleic acid sequence which binds to DNA duplexes, through specific interactions in the major groove of the double helix. Antisense nucleic acid sequences may be introduced into a plant by transformation or direct injection at a specific tissue site. Alternatively, antisense nucleic acid sequences can be modified to target selected cells and then administered systemically. For example, for systemic administration, antisense nucleic acid sequences can be modified such that they specifically bind to receptors or antigens expressed on a selected cell surface, e.g., by linking the antisense nucleic acid sequence to peptides or antibodies which bind to cell surface receptors or antigens. The antisense nucleic acid sequences can also be delivered to cells using the vectors described herein.

[0102] According to a further aspect, the antisense nucleic acid sequence is an a-anomeric nucleic acid sequence. An a-anomeric nucleic acid sequence forms specific double-stranded hybrids with complementary RNA in which, contrary to the usual b-units, the strands run parallel to each other (Gaultier et al. (1987) Nucl Ac Res 15: 6625-6641). The antisense nucleic acid sequence may also comprise a 2′-o-methylribonucleotide (Inoue et al. (1987) Nucl Ac Res 15, 6131-6148) or a chimeric RNA-DNA analogue (Inoue et al. (1987) FEBS Lett. 215, 327-330).

[0103] The reduction or substantial elimination of endogenous gene expression may also be performed using ribozymes. Ribozymes are catalytic RNA molecules with ribonuclease activity that are capable of cleaving a single-stranded nucleic acid sequence, such as an mRNA, to which they have a complementary region. Thus, ribozymes (e.g., hammerhead ribozymes (described in Haselhoff and Gerlach (1988) Nature 334, 585-591) can be used to catalytically cleave mRNA transcripts encoding a polypeptide, thereby substantially reducing the number of mRNA transcripts to be translated into a polypeptide. A ribozyme having specificity for a nucleic acid sequence can be designed (see for example: Cech et al. U.S. Pat. No. 4,987,071; and Cech et al. U.S. Pat. No. 5,116,742). Alternatively, mRNA transcripts corresponding to a nucleic acid sequence can be used to select a catalytic RNA having a specific ribonuclease activity from a pool of RNA molecules (Bartel and Szostak (1993) Science 261, 1411-1418). The use of ribozymes for gene silencing in plants is known in the art (e.g., Atkins et al. (1994) WO 94/00012; Lenne et al. (1995) WO 95/03404; Lutziger et al. (2000) WO 00/00619; Prinsen et al. (1997) WO 97/13865 and Scott et al. (1997) WO 97/38116).

[0104] Gene silencing may also be achieved by insertion mutagenesis (for example, T-DNA insertion or transposon insertion) or by strategies as described by, among others, Angell and Baulcombe ((1999) Plant J 20(3): 357-62), (Amplicon VIGS WO 98/36083), or Baulcombe (WO 99/15682).

[0105] Gene silencing may also occur if there is a mutation on an endogenous gene and/or a mutation on an isolated gene/nucleic acid subsequently introduced into a plant. The reduction or substantial elimination may be caused by a non-functional polypeptide. For example, the polypeptide may bind to various interacting proteins; one or more mutation(s) and/or truncation(s) may therefore provide for a polypeptide that is still able to bind interacting proteins (such as receptor proteins) but that cannot exhibit its normal function (such as signalling ligand).

[0106] A further approach to gene silencing is by targeting nucleic acid sequences complementary to the regulatory region of the gene (e.g., the promoter and/or enhancers) to form triple helical structures that prevent transcription of the gene in target cells. See Helene, C., Anticancer Drug Res. 6, 569-84, 1991; Helene et al., Ann. N.Y. Acad. Sci. 660, 27-36 1992; and Maher, L. J. Bioassays 14, 807-15, 1992.

[0107] Other methods, such as the use of antibodies directed to an endogenous polypeptide for inhibiting its function in planta, or interference in the signalling pathway in which a polypeptide is involved, will be well known to the skilled man. In particular, it can be envisaged that manmade molecules may be useful for inhibiting the biological function of a target polypeptide, or for interfering with the signalling pathway in which the target polypeptide is involved.

[0108] Alternatively, a screening program may be set up to identify in a plant population natural variants of a gene, which variants encode polypeptides with reduced activity. Such natural variants may also be used for example, to perform homologous recombination.

[0109] Artificial and/or natural microRNAs (miRNAs) may be used to knock out gene expression and/or mRNA translation. Endogenous miRNAs are single stranded small RNAs of typically 19-24 nucleotides long. They function primarily to regulate gene expression and/or mRNA translation. Most plant microRNAs (miRNAs) have perfect or near-perfect complementarity with their target sequences. However, there are natural targets with up to five mismatches. They are processed from longer non-coding RNAs with characteristic fold-back structures by double-strand specific RNases of the Dicer family. Upon processing, they are incorporated in the RNA-induced silencing complex (RISC) by binding to its main component, an Argonaute protein. MiRNAs serve as the specificity components of RISC, since they base-pair to target nucleic acids, mostly mRNAs, in the cytoplasm. Subsequent regulatory events include target mRNA cleavage and destruction and/or translational inhibition. Effects of miRNA overexpression are thus often reflected in decreased mRNA levels of target genes.

[0110] Artificial microRNAs (amiRNAs), which are typically 21 nucleotides in length, can be genetically engineered specifically to negatively regulate gene expression of single or multiple genes of interest. Determinants of plant microRNA target selection are well known in the art. Empirical parameters for target recognition have been defined and can be used to aid in the design of specific amiRNAs, (Schwab et al., Dev. Cell 8, 517-527, 2005). Convenient tools for design and generation of amiRNAs and their precursors are also available to the public (Schwab et al., Plant Cell 18, 1121-1133, 2006).

[0111] For optimal performance, the gene silencing techniques used for reducing expression in a plant of an endogenous gene requires the use of nucleic acid sequences from monocotyledonous plants for transformation of monocotyledonous plants, and from dicotyledonous plants for transformation of dicotyledonous plants. Preferably, a nucleic acid sequence from any given plant species is introduced into that same species. For example, a nucleic acid sequence from rice is transformed into a rice plant. However, it is not an absolute requirement that the nucleic acid sequence to be introduced originates from the same plant species as the plant in which it will be introduced. It is sufficient that there is substantial homology between the endogenous target gene and the nucleic acid to be introduced.

[0112] Described above are examples of various methods for the reduction or substantial elimination of expression in a plant of an endogenous gene. A person skilled in the art would readily be able to adapt the aforementioned methods for silencing so as to achieve reduction of expression of an endogenous gene in a whole plant or in parts thereof through the use of an appropriate promoter, for example.

### Transformation

[0113] The term “introduction” or “transformation” as referred to herein encompasses the transfer of an exogenous polynucleotide into a host cell, irrespective of the method used for transfer. Plant tissue capable of subsequent clonal propagation, whether by organogenesis or embryogenesis, may be transformed with a genetic construct of the present invention and a whole plant regenerated there from. The particular tissue chosen will vary depending on the clonal propagation systems available for, and best suited to, the particular species being transformed. Exemplary tissue targets include leaf disks, pollen, embryos, cotyledons, hypocotyls, megagametophytes, callus tissue, existing meristematic tissue (e.g., apical meristem, axillary buds, and root menstems), and induced meristem tissue (e.g., cotyledon meristem and hypocotyl meristem). The polynucleotide may be transiently or stably introduced into a host cell and may be maintained non-integrated, for example, as a plasmid. Alternatively, it may be integrated into the host genome. The resulting transformed plant cell may then be used to regenerate a transformed plant in a manner known to persons skilled in the art.

[0114] The transfer of foreign genes into the genome of a plant is called transformation. Transformation of plant species is now a fairly routine technique. Advantageously, any of several transformation methods may be used to introduce the gene of interest into a suitable ancestor cell. The methods described for the transformation and regeneration of plants from plant tissues or plant cells may be utilized for transient or for stable transformation. Transformation methods include the use of liposomes, electroporation, chemicals that increase free DNA uptake, injection of the DNA directly into the plant, particle gun bombardment, transformation using viruses or pollen and microprojection. Methods may be selected from the calcium/polyethylene glycol method for protoplasts (Krens, F. A. et al., (1982) Nature 296, 72-74; Negrutiu I et al. (1987) Plant Mol Biol 8: 363-373); electroporation of protoplasts (Shillito R. D. et al. (1985) Bio/Technol 3, 1099-1102); microinjection into plant material (Crossway A et al., (1986) Mol. Gen Genet 202: 179-185); DNA or RNA-coated particle bombardment (Klein T M et al., (1987) Nature 327: 70) infection with (non-integrative) viruses and the like. Transgenic plants, including transgenic crop plants, are preferably produced via Agrobacterium-mediated transformation. An advantageous transformation method is the transformation in planta. To this end, it is possible, for example, to allow the agrobacteria to act on plant seeds or to inoculate the plant meristem with agrobacteria. It has proved particularly expedient in accordance with the invention to allow a suspension of transformed agrobacteria to act on the intact plant or at least on the flower primordia. The plant is subsequently grown on until the seeds of the treated plant are obtained (Clough and Bent, Plant J. (1998) 16, 735-743). Methods for Agrobacterium-mediated transformation of rice include well known methods for rice transformation, such as those described in any of the following: European patent application EP 1198985 A1, Aldemita and Hodges (Planta 199: 612-617, 1996); Chan et al. (Plant Mol Biol 22 (3): 491-506, 1993), Hiei et al. (Plant J 6 (2): 271-282, 1994), which disclosures are incorporated by reference herein as if fully set forth. In the case of corn transformation, the preferred method is as described in either Ishida et al. (Nat. Biotechnol 14(6): 745-50, 1996) or Frame et al. (Plant Physiol 129(1): 13-22, 2002), which disclosures are incorporated by reference herein as if fully set forth. Said methods are further described by way of example in B. Jenes et al., Techniques for Gene Transfer, in: Transgenic Plants, Vol. 1, Engineering and Utilization, eds. S. D. Kung and R. Wu, Academic Press (1993) 128-143 and in Potrykus Annu. Rev. Plant Physiol. Plant Molec. Biol. 42 (1991) 205-225). The nucleic acids or the construct to be expressed is preferably cloned into a vector, which is suitable for transforming Agrobacterium tumefaciens, for example pBin19 (Bevan et al., Nucl. Acids Res. 12 (1984) 8711). Agrobacteria transformed by such a vector can then be used in known manner for the transformation of plants, such as plants used as a model, like Arabidopsis (Arabidopsis thaliana is within the scope of the present invention not considered as a crop plant), or crop plants such as, by way of example, tobacco plants, for example by immersing bruised leaves or chopped leaves in an agrobacterial solution and then culturing them in suitable media. The transformation of plants by means of Agrobacterium tumefaciens is described, for example, by Höfgen and Willmitzer in Nucl. Acid Res. (1988) 16, 9877 or is known inter alia from F. F. White, Vectors for Gene Transfer in Higher Plants; in Transgenic Plants, Vol. 1, Engineering and Utilization, eds. S. D. Kung and R. Wu, Academic Press, 1993, pp. 15-38.

[0115] In addition to the transformation of somatic cells, which then have to be regenerated into intact plants, it is also possible to transform the cells of plant meristems and in particular those cells which develop into gametes. In this case, the transformed gametes follow the natural plant development, giving rise to transgenic plants. Thus, for example, seeds of Arabidopsis are treated with agrobacteria and seeds are obtained from the developing plants of which a certain proportion is transformed and thus transgenic [Feldman, K A and Marks M D (1987). Mol Gen Genet 208:1-9; Feldmann K (1992). In: C Koncz, N-H Chua and J Shell, eds, Methods in Arabidopsis Research. Word Scientific, Singapore, pp. 274-289]. Alternative methods are based on the repeated removal of the inflorescences and incubation of the excision site in the center of the rosette with transformed agrobacteria, whereby transformed seeds can likewise be obtained at a later point in time (Chang (1994). Plant J. 5: 551-558; Katavic (1994). Mol Gen Genet, 245: 363-370). However, an especially effective method is the vacuum infiltration method with its modifications such as the “floral dip” method. In the case of vacuum infiltration of Arabidopsis, intact plants under reduced pressure are treated with an agrobacterial suspension [Bechthold, N (1993). C R Acad Sci Paris Life Sci, 316: 1194-1199], while in the case of the “floral dip” method the developing floral tissue is incubated briefly with a surfactant-treated agrobacterial suspension [Clough, S J and Bent A F (1998) The Plant J. 16, 735-743]. A certain proportion of transgenic seeds are harvested in both cases, and these seeds can be distinguished from non-transgenic seeds by growing under the above-described selective conditions. In addition the stable transformation of plastids is of advantages because plastids are inherited maternally is most crops reducing or eliminating the risk of transgene flow through pollen. The transformation of the chloroplast genome is generally achieved by a process which has been schematically displayed in Klaus et al., 2004 [Nature Biotechnology 22 (2), 225-229]. Briefly the sequences to be transformed are cloned together with a selectable marker gene between flanking sequences homologous to the chloroplast genome. These homologous flanking sequences direct site specific integration into the plastome. Plastidal transformation has been described for many different plant species and an overview is given in Bock (2001) Transgenic plastids in basic research and plant biotechnology. J Mol Biol. 2001 Sep. 21; 312 (3):425-38 or Maliga, P (2003) Progress towards commercialization of plastid transformation technology. Trends Biotechnol. 21, 20-28. Further biotechnological progress has recently been reported in form of marker free plastid transformants, which can be produced by a transient co-integrated maker gene (Klaus et al., 2004, Nature Biotechnology 22(2), 225-229).

[0116] The genetically modified plant cells can be regenerated via all methods with which the skilled worker is familiar. Suitable methods can be found in the abovementioned publications by S. D. Kung and R. Wu, Potrykus or Höfgen and Willmitzer.

[0117] Generally after transformation, plant cells or cell groupings are selected for the presence of one or more markers which are encoded by plant-expressible genes co-transferred with the gene of interest, following which the transformed material is regenerated into a whole plant. To select transformed plants, the plant material obtained in the transformation is, as a rule, subjected to selective conditions so that transformed plants can be distinguished from untransformed plants. For example, the seeds obtained in the above-described manner can be planted and, after an initial growing period, subjected to a suitable selection by spraying. A further possibility consists in growing the seeds, if appropriate after sterilization, on agar plates using a suitable selection agent so that only the transformed seeds can grow into plants. Alternatively, the transformed plants are screened for the presence of a selectable marker such as the ones described above.

[0118] Following DNA transfer and regeneration, putatively transformed plants may also be evaluated, for instance using Southern analysis, for the presence of the gene of interest, copy number and/or genomic organisation. Alternatively or additionally, expression levels of the newly introduced DNA may be monitored using Northern and/or Western analysis, both techniques being well known to persons having ordinary skill in the art.

[0119] The generated transformed plants may be propagated by a variety of means, such as by clonal propagation or classical breeding techniques. For example, a first generation (or T1) transformed plant may be selfed and homozygous second-generation (or T2) transformants selected, and the T2 plants may then further be propagated through classical breeding techniques. The generated transformed organisms may take a variety of forms. For example, they may be chimeras of transformed cells and non-transformed cells; clonal transformants (e.g., all cells transformed to contain the expression cassette); grafts of transformed and untransformed tissues (e.g., in plants, a transformed rootstock grafted to an untransformed scion).

[0120] Throughout this application a plant, plant part, seed or plant cell transformed with—or interchangeably transformed by—a construct or transformed with or by a nucleic acid is to be understood as meaning a plant, plant part, seed or plant cell that carries said construct or said nucleic acid as a transgene due the result of an introduction of said construct or said nucleic acid by biotechnological means. The plant, plant part, seed or plant cell therefore comprises said recombinant construct or said recombinant nucleic acid. Any plant, plant part, seed or plant cell that no longer contains said recombinant construct or said recombinant nucleic acid after introduction in the past, is termed null-segregant, nullizygote or null control, but is not considered a plant, plant part, seed or plant cell transformed with said construct or with said nucleic acid within the meaning of this application.

### T-DNA Activation Tagging

[0121] T-DNA activation tagging (Hayashi et al. Science (1992) 1350-1353), involves insertion of T-DNA, usually containing a promoter (may also be a translation enhancer or an intron), in the genomic region of the gene of interest or 10 kb up- or downstream of the coding region of a gene in a configuration such that the promoter directs expression of the targeted gene. Typically, regulation of expression of the targeted gene by its natural promoter is disrupted and the gene falls under the control of the newly introduced promoter. The promoter is typically embedded in a T-DNA. This T-DNA is randomly inserted into the plant genome, for example, through Agrobacterium infection and leads to modified expression of genes near the inserted T-DNA. The resulting transgenic plants show dominant phenotypes due to modified expression of genes close to the introduced promoter.

### TILLING

[0122] The term “TILLING” is an abbreviation of “Targeted Induced Local Lesions In Genomes” and refers to a mutagenesis technology useful to generate and/or identify nucleic acids encoding proteins with modified expression and/or activity. TILLING also allows selection of plants carrying such mutant variants. These mutant variants may exhibit modified expression, either in strength or in location or in timing (if the mutations affect the promoter for example). These mutant variants may exhibit higher activity than that exhibited by the gene in its natural form. TILLING combines high-density mutagenesis with high-throughput screening methods. The steps typically followed in TILLING are: (a) EMS mutagenesis (Redei G P and Koncz C (1992) In Methods in Arabidopsis Research, Koncz C, Chua N H, Schell J, eds. Singapore, World Scientific Publishing Co, pp. 16-82; Feldmann et al., (1994) In Meyerowitz E M, Somerville C R, eds, Arabidopsis. Cold Spring Harbor Laboratory Press, Cold Spring Harbor, N.Y., pp 137-172; Lightner J and Caspar T (1998) In J Martinez-Zapater, J Salinas, eds, Methods on Molecular Biology, Vol. 82. Humana Press, Totowa, N.J., pp 91-104); (b) DNA preparation and pooling of individuals; (c) PCR amplification of a region of interest; (d) denaturation and annealing to allow formation of heteroduplexes; (e) DHPLC, where the presence of a heteroduplex in a pool is detected as an extra peak in the chromatogram; (f) identification of the mutant individual; and (g) sequencing of the mutant PCR product. Methods for TILLING are well known in the art (McCallum et al., (2000) Nat Biotechnol 18: 455-457; reviewed by Stemple (2004) Nat Rev Genet 5(2): 145-50).

### Homologous Recombination

[0123] Homologous recombination allows introduction in a genome of a selected nucleic acid at a defined selected position. Homologous recombination is a standard technology used routinely in biological sciences for lower organisms such as yeast or the moss Physcomitrella. Methods for performing homologous recombination in plants have been described not only for model plants (Offring a et al. (1990) EMBO J 9(10): 3077-84) but also for crop plants, for example rice (Terada et al. (2002) Nat Biotech 20(10): 1030-4; Iida and Terada (2004) Curr Opin Biotech 15(2): 132-8), and approaches exist that are generally applicable regardless of the target organism (Miller et al, Nature Biotechnol. 25, 778-785, 2007).

### Yield Related Traits

[0124] Yield related traits are traits or features which are related to plant yield. Yield-related traits may comprise one or more of the following non-limitative list of features: early flowering time, yield, biomass, seed yield, early vigour, greenness index, increased growth rate, improved agronomic traits, such as e.g. increased tolerance to submergence (which leads to increased yield in rice), improved Water Use Efficiency (WUE), improved Nitrogen Use Efficiency (NUE), etc.

### Yield

[0125] The term “yield” in general means a measurable produce of economic value, typically related to a specified crop, to an area, and to a period of time. Individual plant parts directly contribute to yield based on their number, size and/or weight, or the actual yield is the yield per square meter for a crop and year, which is determined by dividing total production (includes both harvested and appraised production) by planted square meters.

[0126] The terms “yield” of a plant and “plant yield” are used interchangeably herein and are meant to refer to vegetative biomass such as root and/or shoot biomass, to reproductive organs, and/or to propagules such as seeds of that plant.

[0127] Flowers in maize are unisexual; male inflorescences (tassels) originate from the apical stem and female inflorescences (ears) arise from axillary bud apices. The female inflorescence produces pairs of spikelets on the surface of a central axis (cob). Each of the female spikelets encloses two fertile florets, one of them will usually mature into a maize kernel once fertilized. Hence a yield increase in maize may be manifested as one or more of the following: increase in the number of plants established per square meter, an increase in the number of ears per plant, an increase in the number of rows, number of kernels per row, kernel weight, thousand kernel weight, ear length/diameter, increase in the seed filling rate, which is the number of filled florets (i.e. florets containing seed) divided by the total number of florets and multiplied by 100), among others.

[0128] Inflorescences in rice plants are named panicles. The panicle bears spikelets, which are the basic units of the panicles, and which consist of a pedicel and a floret. The floret is borne on the pedicel and includes a flower that is covered by two protective glumes: a larger glume (the lemma) and a shorter glume (the palea). Hence, taking rice as an example, a yield increase may manifest itself as an increase in one or more of the following: number of plants per square meter, number of panicles per plant, panicle length, number of spikelets per panicle, number of flowers (or florets) per panicle; an increase in the seed filling rate which is the number of filled florets (i.e. florets containing seeds) divided by the total number of florets and multiplied by 100; an increase in thousand kernel weight, among others.

### Early Flowering Time

[0129] Plants having an “early flowering time” as used herein are plants which start to flower earlier than control plants. Hence this term refers to plants that show an earlier start of flowering. Flowering time of plants can be assessed by counting the number of days (“time to flower”) between sowing and the emergence of a first inflorescence. The “flowering time” of a plant can for instance be determined using the method as described in WO 2007/093444.

### Early Vigour

[0130] “Early vigour” refers to active healthy well-balanced growth especially during early stages of plant growth, and may result from increased plant fitness due to, for example, the plants being better adapted to their environment (i.e. optimizing the use of energy resources and partitioning between shoot and root). Plants having early vigour also show increased seedling survival and a better establishment of the crop, which often results in highly uniform fields (with the crop growing in uniform manner, i.e. with the majority of plants reaching the various stages of development at substantially the same time), and often better and higher yield. Therefore, early vigour may be determined by measuring various factors, such as thousand kernel weight, percentage germination, percentage emergence, seedling growth, seedling height, root length, root and shoot biomass and many more.

### Increased Growth Rate

[0131] The increased growth rate may be specific to one or more parts of a plant (including seeds), or may be throughout substantially the whole plant. Plants having an increased growth rate may have a shorter life cycle. The life cycle of a plant may be taken to mean the time needed to grow from a dry mature seed up to the stage where the plant has produced dry mature seeds, similar to the starting material. This life cycle may be influenced by factors such as speed of germination, early vigour, growth rate, greenness index, flowering time and speed of seed maturation. The increase in growth rate may take place at one or more stages in the life cycle of a plant or during substantially the whole plant life cycle. Increased growth rate during the early stages in the life cycle of a plant may reflect enhanced vigour. The increase in growth rate may alter the harvest cycle of a plant allowing plants to be sown later and/or harvested sooner than would otherwise be possible (a similar effect may be obtained with earlier flowering time). If the growth rate is sufficiently increased, it may allow for the further sowing of seeds of the same plant species (for example sowing and harvesting of rice plants followed by sowing and harvesting of further rice plants all within one conventional growing period). Similarly, if the growth rate is sufficiently increased, it may allow for the further sowing of seeds of different plants species (for example the sowing and harvesting of corn plants followed by, for example, the sowing and optional harvesting of soybean, potato or any other suitable plant). Harvesting additional times from the same rootstock in the case of some crop plants may also be possible. Altering the harvest cycle of a plant may lead to an increase in annual biomass production per square meter (due to an increase in the number of times (say in a year) that any particular plant may be grown and harvested). An increase in growth rate may also allow for the cultivation of transgenic plants in a wider geographical area than their wild-type counterparts, since the territorial limitations for growing a crop are often determined by adverse environmental conditions either at the time of planting (early season) or at the time of harvesting (late season). Such adverse conditions may be avoided if the harvest cycle is shortened. The growth rate may be determined by deriving various parameters from growth curves, such parameters may be: T-Mid (the time taken for plants to reach 50% of their maximal size) and T-90 (time taken for plants to reach 90% of their maximal size), amongst others.

### Stress Resistance

[0132] An increase in yield and/or growth rate occurs whether the plant is under non-stress conditions or whether the plant is exposed to various stresses compared to control plants. Plants typically respond to exposure to stress by growing more slowly. In conditions of severe stress, the plant may even stop growing altogether. Mild stress on the other hand is defined herein as being any stress to which a plant is exposed which does not result in the plant ceasing to grow altogether without the capacity to resume growth. Mild stress in the sense of the invention leads to a reduction in the growth of the stressed plants of less than 40%, 35%, 30% or 25%, more preferably less than 20% or 15% in comparison to the control plant under non-stress conditions. Due to advances in agricultural practices (irrigation, fertilization, pesticide treatments) severe stresses are not often encountered in cultivated crop plants. As a consequence, the compromised growth induced by mild stress is often an undesirable feature for agriculture. “Mild stresses” are the everyday biotic and/or abiotic (environmental) stresses to which a plant is exposed. Abiotic stresses may be due to drought or excess water, anaerobic stress, salt stress, chemical toxicity, oxidative stress and hot, cold or freezing temperatures.

[0133] “Biotic stresses” are typically those stresses caused by pathogens, such as bacteria, viruses, fungi, nematodes and insects.

[0134] The “abiotic stress” may be an osmotic stress caused by a water stress, e.g. due to drought, salt stress, or freezing stress. Abiotic stress may also be an oxidative stress or a cold stress. “Freezing stress” is intended to refer to stress due to freezing temperatures, i.e. temperatures at which available water molecules freeze and turn into ice. “Cold stress”, also called “chilling stress”, is intended to refer to cold temperatures, e.g. temperatures below 10°, or preferably below 5° C., but at which water molecules do not freeze. As reported in Wang et al. (Planta (2003) 218: 1-14), abiotic stress leads to a series of morphological, physiological, biochemical and molecular changes that adversely affect plant growth and productivity. Drought, salinity, extreme temperatures and oxidative stress are known to be interconnected and may induce growth and cellular damage through similar mechanisms. Rabbani et al. (Plant Physiol (2003) 133: 1755-1767) describes a particularly high degree of “cross talk” between drought stress and high-salinity stress. For example, drought and/or salinisation are manifested primarily as osmotic stress, resulting in the disruption of homeostasis and ion distribution in the cell. Oxidative stress, which frequently accompanies high or low temperature, salinity or drought stress, may cause denaturing of functional and structural proteins. As a consequence, these diverse environmental stresses often activate similar cell signalling pathways and cellular responses, such as the production of stress proteins, up-regulation of anti-oxidants, accumulation of compatible solutes and growth arrest. The term “non-stress” conditions as used herein are those environmental conditions that allow optimal growth of plants. Persons skilled in the art are aware of normal soil conditions and climatic conditions for a given location. Plants with optimal growth conditions, (grown under non-stress conditions) typically yield in increasing order of preference at least 97%, 95%, 92%, 90%, 87%, 85%, 83%, 80%, 77% or 75% of the average production of such plant in a given environment. Average production may be calculated on harvest and/or season basis. Persons skilled in the art are aware of average yield productions of a crop.

[0135] In particular, the methods of the present invention may be performed under non-stress conditions. In an example, the methods of the present invention may be performed under non-stress conditions such as mild drought to give plants having increased yield relative to control plants.

[0136] In another embodiment, the methods of the present invention may be performed under stress conditions.

[0137] In an example, the methods of the present invention may be performed under stress conditions such as drought to give plants having increased yield relative to control plants.

[0138] In another example, the methods of the present invention may be performed under stress conditions such as nutrient deficiency to give plants having increased yield relative to control plants.

[0139] Nutrient deficiency may result from a lack of nutrients such as nitrogen, phosphates and other phosphorous-containing compounds, potassium, calcium, magnesium, manganese, iron and boron, amongst others.

[0140] In yet another example, the methods of the present invention may be performed under stress conditions such as salt stress to give plants having increased yield relative to control plants. The term salt stress is not restricted to common salt (NaCl), but may be any one or more of: NaCl, KCl, LiCl, MgCl₂, CaCl₂, amongst others.

[0141] In yet another example, the methods of the present invention may be performed under stress conditions such as cold stress or freezing stress to give plants having increased yield relative to control plants.

### Increase/Improve/Enhance

[0142] The terms “increase”, “improve” or “enhance” are interchangeable and shall mean in the sense of the application at least a 3%, 4%, 5%, 6%, 7%, 8%, 9% or 10%, preferably at least 15% or 20%, more preferably 25%, 30%, 35% or 40% more yield and/or growth in comparison to control plants as defined herein.

### Seed Yield

[0143] Increased seed yield may manifest itself as one or more of the following:

a) an increase in seed biomass (total seed weight) which may be on an individual seed basis and/or per plant and/or per square meter;
b) increased number of flowers per plant;
c) increased number of seeds;
d) increased seed filling rate (which is expressed as the ratio between the number of filled florets divided by the total number of florets);
e) increased harvest index, which is expressed as a ratio of the yield of harvestable parts, such as seeds, divided by the biomass of aboveground plant parts; and
f) increased thousand kernel weight (TKW), which is extrapolated from the number of seeds counted and their total weight. An increased TKW may result from an increased seed size and/or seed weight, and may also result from an increase in embryo and/or endosperm size.

[0144] The terms “filled florets” and “filled seeds” may be considered synonyms.

[0145] An increase in seed yield may also be manifested as an increase in seed size and/or seed volume. Furthermore, an increase in seed yield may also manifest itself as an increase in seed area and/or seed length and/or seed width and/or seed perimeter.

### Greenness Index

[0146] The “greenness index” as used herein is calculated from digital images of plants. For each pixel belonging to the plant object on the image, the ratio of the green value versus the red value (in the RGB model for encoding color) is calculated. The greenness index is expressed as the percentage of pixels for which the green-to-red ratio exceeds a given threshold. Under normal growth conditions, under salt stress growth conditions, and under reduced nutrient availability growth conditions, the greenness index of plants is measured in the last imaging before flowering. In contrast, under drought stress growth conditions, the greenness index of plants is measured in the first imaging after drought.

### Biomass

[0147] The term “biomass” as used herein is intended to refer to the total weight of a plant. Within the definition of biomass, a distinction may be made between the biomass of one or more parts of a plant, which may include any one or more of the following:
[0148] aboveground parts such as but not limited to shoot biomass, seed biomass, leaf biomass, etc.;
[0149] aboveground harvestable parts such as but not limited to shoot biomass, seed biomass, leaf biomass, etc.;
[0150] parts below ground, such as but not limited to root biomass, tubers, bulbs, etc.;
[0151] harvestable parts below ground, such as but not limited to root biomass, tubers, bulbs, etc.,
[0152] harvestable parts partly inserted in or in physical contact with the ground such as but not limited to beets and other hypocotyl areas of a plant, rhizomes, stolons or creeping rootstalks;
[0153] vegetative biomass such as root biomass, shoot biomass, etc.;
[0154] reproductive organs; and
[0155] propagules such as seed.

[0156] In a preferred embodiment throughout this application any reference to “root” as biomass or harvestable parts or as organ of increased sugar content is to be understood as a reference to harvestable parts partly inserted in or in physical contact with the ground such as but not limited to beets and other hypocotyl areas of a plant, rhizomes, stolons or creeping rootstalks, but not including leaves, as well as harvestable parts belowground, such as but not limited to root, taproot, tubers or bulbs.

### Marker Assisted Breeding

[0157] Such breeding programmes sometimes require introduction of allelic variation by mutagenic treatment of the plants, using for example EMS mutagenesis; alternatively, the programme may start with a collection of allelic variants of so called “natural” origin caused unintentionally. Identification of allelic variants then takes place, for example, by PCR. This is followed by a step for selection of superior allelic variants of the sequence in question and which give increased yield. Selection is typically carried out by monitoring growth performance of plants containing different allelic variants of the sequence in question. Growth performance may be monitored in a greenhouse or in the field. Further optional steps include crossing plants in which the superior allelic variant was identified with another plant. This could be used, for example, to make a combination of interesting phenotypic features.

### Use as Probes in (Gene Mapping)

[0158] Use of nucleic acids encoding the protein of interest for genetically and physically mapping the genes requires only a nucleic acid sequence of at least 15 nucleotides in length. These nucleic acids may be used as restriction fragment length polymorphism (RFLP) markers. Southern blots (Sambrook J, Fritsch E F and Maniatis T (1989) Molecular Cloning, A Laboratory Manual) of restriction-digested plant genomic DNA may be probed with the nucleic acids encoding the protein of interest. The resulting banding patterns may then be subjected to genetic analyses using computer programs such as MapMaker (Lander et al. (1987) Genomics 1: 174-181) in order to construct a genetic map. In addition, the nucleic acids may be used to probe Southern blots containing restriction endonuclease-treated genomic DNAs of a set of individuals representing parent and progeny of a defined genetic cross. Segregation of the DNA polymorphisms is noted and used to calculate the position of the nucleic acid encoding the protein of interest in the genetic map previously obtained using this population (Botstein et al. (1980) Am. J. Hum. Genet. 32:314-331).

[0159] The production and use of plant gene-derived probes for use in genetic mapping is described in Bernatzky and Tanksley (1986) Plant Mol. Biol. Reporter 4: 37-41. Numerous publications describe genetic mapping of specific cDNA clones using the methodology outlined above or variations thereof. For example, F2 intercross populations, backcross populations, randomly mated populations, near isogenic lines, and other sets of individuals may be used for mapping. Such methodologies are well known to those skilled in the art.

[0160] The nucleic acid probes may also be used for physical mapping (i.e., placement of sequences on physical maps; see Hoheisel et al. In: Non-mammalian Genomic Analysis: A Practical Guide, Academic press 1996, pp. 319-346, and references cited therein).

[0161] In another embodiment, the nucleic acid probes may be used in direct fluorescence in situ hybridisation (FISH) mapping (Trask (1991) Trends Genet. 7:149-154). Although current methods of FISH mapping favour use of large clones (several kb to several hundred kb; see Laan et al. (1995) Genome Res. 5:13-20), improvements in sensitivity may allow performance of FISH mapping using shorter probes.

[0162] A variety of nucleic acid amplification-based methods for genetic and physical mapping may be carried out using the nucleic acids. Examples include allele-specific amplification (Kazazian (1989) J. Lab. Clin. Med 11:95-96), polymorphism of PCR-amplified fragments (CAPS; Sheffield et al. (1993) Genomics 16:325-332), allele-specific ligation (Landegren et al. (1988) Science 241:1077-1080), nucleotide extension reactions (Sokolov (1990) Nucleic Acid Res. 18:3671), Radiation Hybrid Mapping (Walter et al. (1997) Nat. Genet. 7:22-28) and Happy Mapping (Dear and Cook (1989) Nucleic Acid Res. 17:6795-6807). For these methods, the sequence of a nucleic acid is used to design and produce primer pairs for use in the amplification reaction or in primer extension reactions. The design of such primers is well known to those skilled in the art. In methods employing PCR-based genetic mapping, it may be necessary to identify DNA sequence differences between the parents of the mapping cross in the region corresponding to the instant nucleic acid sequence. This, however, is generally not necessary for mapping methods.

### Plant

[0163] The term “plant” as used herein encompasses whole plants, ancestors and progeny of the plants and plant parts, including seeds, shoots, stems, leaves, roots (including tubers), flowers, and tissues and organs, wherein each of the aforementioned comprise the gene/nucleic acid of interest. The term “plant” also encompasses plant cells, suspension cultures, callus tissue, embryos, meristematic regions, gametophytes, sporophytes, pollen and microspores, again wherein each of the aforementioned comprises the gene/nucleic acid of interest.

[0164] Plants that are particularly useful in the methods of the invention include all plants which belong to the superfamily Viridiplantae, in particular monocotyledonous and dicotyledonous plants including fodder or forage legumes, ornamental plants, food crops, trees or shrubs selected from the list comprising Acer spp., Actinidia spp., Abelmoschus spp., Agave sisalana, Agropyron spp., Agrostis stolonifera, Allium spp., Amaranthus spp., Ammophila arenaria, Ananas comosus, Annona spp., Apium graveolens, Arachis spp, Artocarpus spp., Asparagus officinalis, Avena spp. (e.g. Avena sativa, Avena fatua, Avena byzantine, Avena fatua var. sativa, Avena hybrida), Averrhoa carambola, Bambusa sp., Benincasa hispida, Bertholletia excelsea, Beta vulgaris, Brassica spp. (e.g. Brassica napus, Brassica rapa ssp. [canola, oilseed rape, turnip rape]), Cadaba farinosa, Camellia sinensis, Canna indica, Cannabis sativa, Capsicum spp., Carex elate, Carica papaya, Carissa macrocarpa, Carya spp., Carthamus tinctorius, Castanea spp., Ceiba pentandra, Cichorium endivia, Cinnamomum spp., Citrullus lanatus, Citrus spp., Cocos spp., Coffea spp., Colocasia esculenta, Cola spp., Corchorus sp., Coriandrum sativum, Corylus spp., Crataegus spp., Crocus sativus, Cucurbita spp., Cucumis spp., Cynara spp., Daucus carota, Desmodium spp., Dimocarpus longan, Dioscorea spp., Diospyros spp., Echinochloa spp., Elaeis (e.g. Elaeis guineensis, Elaeis oleifera), Eleusine coracana, Eragrostis tef, Erianthus sp., Eriobotrya japonica, Eucalyptus sp., Eugenia uniflora, Fagopyrum spp., Fagus spp., Festuca arundinacea, Ficus carica, Fortunella spp., Fragaria spp., Ginkgo biloba, Glycine spp. (e.g. Glycine max, Soja hispida or Soja max), Gossypium hirsutum, Helianthus spp. (e.g. Helianthus annuus), Hemerocallis fulva, Hibiscus spp., Hordeum spp. (e.g. Hordeum vulgare), Ipomoea batatas, Juglans spp., Lactuca sativa, Lathyrus spp., Lens culinaris, Linum usitatissimum, Litchi chinensis, Lotus spp., Luffa acutangula, Lupinus spp., Luzula sylvatica, Lycopersicon spp. (e.g. Lycopersicon esculentum, Lycopersicon lycopersicum, Lycopersicon pyriforme), Macrotyloma spp., Malus spp., Malpighia emarginata, Mammea americana, Mangifera indica, Manihot spp., Manilkara zapota, Medicago sativa, Melilotus spp., Mentha spp., Miscanthus sinensis, Momordica spp., Morus nigra, Musa spp., Nicotiana spp., Olea spp., Opuntia spp., Ornithopus spp., Oryza spp. (e.g. Oryza sativa, Oryza latifolia), Panicum miliaceum, Panicum virgatum, Passiflora edulis, Pastinaca sativa, Pennisetum sp., Persea spp., Petroselinum crispum, Phalaris arundinacea, Phaseolus spp., Phleum pratense, Phoenix spp., Phragmites australis, Physalis spp., Pinus spp., Pistacia vera, Pisum spp., Poa spp., Populus spp., Prosopis spp., Prunus spp., Psidium spp., Punica granatum, Pyrus communis, Quercus spp., Raphanus sativus, Rheum rhabarbarum, Ribes spp., Ricinus communis, Rubus spp., Saccharum spp., Salix sp., Sambucus spp., Secale cereale, Sesamum spp., Sinapis sp., Solanum spp. (e.g. Solanum tuberosum, Solanum integrifolium or Solanum lycopersicum), Sorghum bicolor, Spinacia spp., Syzygium spp., Tagetes spp., Tamarindus indica, Theobroma cacao, Trifolium spp., Tripsacum dactyloides, Triticosecale rimpaui, Triticum spp. (e.g. Triticum aestivum, Triticum durum, Triticum turgidum, Triticum hybernum, Triticum macha, Triticum sativum, Triticum monococcum or Triticum vulgare), Tropaeolum minus, Tropaeolum majus, Vaccinium spp., Vicia spp., Vigna spp., Viola odorata, Vitis spp., Zea mays, Zizania palustris, Ziziphus spp., amongst others.

[0165] With respect to the sequences of the invention, a nucleic acid or a polypeptide sequence of plant origin has the characteristic of a codon usage optimised for expression in plants, and of the use of amino acids and regulatory sites common in plants, respectively. The plant of origin may be any plant, but preferably those plants as described in the previous paragraph.

### Control Plant(s)

[0166] The choice of suitable control plants is a routine part of an experimental setup and may include corresponding wild type plants or corresponding plants without the gene of interest. The control plant is typically of the same plant species or even of the same variety as the plant to be assessed. The control plant may also be a nullizygote of the plant to be assessed. Nullizygotes (also called null control plants) are individuals missing the transgene by segregation. Further, a control plant has been grown under equal growing conditions to the growing conditions of the plants of the invention. Typically the control plant is grown under equal growing conditions and hence in the vicinity of the plants of the invention and at the same time. A “control plant” as used herein refers not only to whole plants, but also to plant parts, including seeds and seed parts.

### C. DETAILED DESCRIPTION OF THE INVENTION

### C-1. TLP (Tify Like Protein) Polypeptide

[0167] Surprisingly, it has now been found that modulating expression in a plant of a nucleic acid encoding a TLP polypeptide gives plants having enhanced yield-related traits relative to control plants.

[0168] According to a first embodiment, the present invention provides a method for enhancing yield-related traits in plants relative to control plants, comprising modulating expression in a plant of a nucleic acid encoding a TLP polypeptide and optionally selecting for plants having enhanced yield-related traits. According to another embodiment, the present invention provides a method for producing plants having enhancing yield-related traits relative to control plants, wherein said method comprises the steps of modulating expression in said plant of a nucleic acid encoding a TLP polypeptide as described herein and optionally selecting for plants having enhanced yield-related traits.

[0169] A preferred method for modulating (preferably, increasing) expression of a nucleic acid encoding a TLP polypeptide is by introducing and expressing in a plant a nucleic acid encoding a TLP polypeptide.

[0170] Any reference hereinafter in section C-1 to a “protein useful in the methods of the invention” is taken to mean a TLP polypeptide as defined herein. Any reference hereinafter to a “nucleic acid useful in the methods of the invention” is taken to mean a nucleic acid capable of encoding such a TLP polypeptide. In one embodiment any reference to a protein or nucleic acid “useful in the methods of the invention” is to be understood to mean proteins or nucleic acids “useful in the methods, constructs, plants, harvestable parts and products of the invention”. The nucleic acid to be introduced into a plant (and therefore useful in performing the methods of the invention) is any nucleic acid encoding the type of protein which will now be described, hereafter also named “TLP nucleic acid” or “TLP gene”.

[0171] A “TLP polypeptide” as defined herein refers, preferably, to any polypeptide comprising a Pfam domain having the Pfam accession number PF06200 (TIFY), or a Pfam domain having the accessing number PF09425 (CCT_{—}2). More preferably, it refers to any polypeptide comprising a Pfam domain having the Pfam accession number PF06200 (TIFY) and a Pfam domain having the accessing number PF09425 (CCT_{—}2).

[0172] Preferably, the PF06200 Pfam domain and PF09425 Pfam domain are separated in an increasing order of preference by at least 10, at least 25, at least 50, at least 75, at least 100 amino acids.

[0173] Preferably, the PF06200 Pfam domain is located in the central part of the protein. Preferably, the PF09425 Pfam domain is located in the C-terminal part of the polypeptide.

[0174] Preferably, the Pfam domain having the Pfam accession number PF06200 (also referred to as “PF06200 pfam domain” herein) comprises a sequence having at least 70%, 71%, 72%, 73%, 74%, 75%, 76%, 77%, 78%, 79%, 80%, 81%, 82%, 83%, 84%, 85%, 86%, 87%, 88%, 89%, 90%, 91%, 92%, 93%, 94%, 95%, 96%, 97%, 98%, 99% or 100% sequence identity to the conserved domain starting with amino acid 144 up to amino acid 178 in SEQ ID NO:2. Preferably, the Pfam domain having the Pfam accession number PF09425 (also referred to as “PF09425 pfam domain” herein) comprises a sequence having at least 70%, 71%, 72%, 73%, 74%, 75%, 76%, 77%, 78%, 79%, 80%, 81%, 82%, 83%, 84%, 85%, 86%, 87%, 88%, 89%, 90%, 91%, 92%, 93%, 94%, 95%, 96%, 97%, 98%, 99% or 100% sequence identity to the conserved domain starting with amino acid 282 up to amino acid 306 in SEQ ID NO:2.

[0175] Additionally or alternatively, the “TLP polypeptide” as defined herein refers, preferably, to any polypeptide comprising an Interpro domain IPR010399 (TIFY), or an Interpro domain IPR018467 (CO, COL, TOC1). More preferably, it refers to any polypeptide comprising an Interpro domain IPR010399 (TIFY) and an Interpro domain IPR018467 (CO, COL, TOC1).

[0176] The Interpro domains as referred to herein are, preferably, based on the InterPro database, Release 31.0 (9 Feb. 2011).

[0177] The Pfam domains as referred to herein are, preferably, based on the Pfam database, Release 24.0 (Pfam 24.0, October 2009), see also The Pfam protein families database: R. D. Finn, J. Mistry, J. Tate, P. Coggill, A. Heger, J. E. Pollington, O. L. Gavin, P. Gunesekaran, G. Ceric, K. Forslund, L. Holm, E. L. Sonnhammer, S. R. Eddy, A. Bateman Nucleic Acids Research (2010) Database Issue 38:D211-222.

[0178] Preferably, the TLP polypeptide additionally or alternatively comprises one or more of the following motifs (see also FIG. 1):

Motif 1-1 (SEQ ID NO: 35):
QLTIFY[AG]G[SM]V[NC]V[YF][DE][DN][IV]S[PA]EKAQ[AE][IL]M
Motif 2-1 (SEQ ID NO: 37):
PQARKASLARFLEKRKERV[MT][NST][TAL][AS]PY
Motif 3-1 (SEQ ID NO: 39):
MERDF[LM]GL[NGSI][IS]K[DEN][PS][LP][LA][VT][VI]K[DE]Exxx[SD][SG],
wherein “X”, preferably, represents any amino acid
Motif 4-1 (SEQ ID NO: 40):
Q[LM]TIFY[AG]G[SMATL]V[NCS][VI][YF][DEN][DN][IV][STP][PAV][ED][KQ]A[QK][AE][IL]
MFLA[GS][HNR]
Motif 5-1 (SEQ ID NO: 43):
RFLEKRKE
Motif 6-1 (SEQ ID NO: 44):
QLTIFY[AG]G
Motif 7-1 (SEQ ID NO: 45):
MERDF[LM]GL

[0179] Instead of Motif 1-1, the TLP polypeptide may, preferably, comprise Motif 1-1a):

(SEQ ID NO: 36)
QLTIFYGGMV[NC]V[YF]E[DN][IV]S[PA]EKAQ[AE][IL]M

[0180] Instead of Motif 2-1, the TLP polypeptide may, preferably, comprise Motif 2-1a):

(SEQ ID NO: 38)
PQARKASLARFLEKRKERV[MT][NST]L[AS]PY

[0181] Instead of Motif 4-1, the TLP polypeptide may, preferably, comprise Motif 4-1a):

(SEQ ID NO: 41)
Q[LM]TIFY[AG]G[SMATL]V[NCS][VI][YF][DEN][DN]
[IV][STP][PAV][ED],
and/or Motif 4-1b):

[0182] [KQ]A[QK][AE][IL]MFLA[GS][HNR] (SEQ ID NO: 42), preferably both, i.e. Motif 4-1a and 4b. Preferably, the order is Motif 4-1a and then Motif 4-1b). Preferably, Motifs 4-1a) and 4-1b) are separated in an increasing order of preference, by 20, 19, 18, 17, 16, 15, or 14 amino acids.

[0183] Preferably, Motif 1-1 (and/or Motif 1-1a and/or 4-1, respectively) is comprised by the PF06200 Pfam domain and/or IPR010399 domain. Preferably, Motif 2-1 (and/or Motif 2-1a and/or 5-1, respectively) is comprised by the PF09425 Pfam domain and/or IPR018467 domain.

[0184] The term “TLP” or “TLP polypeptide” as used herein also intends to include homologues as defined hereunder of “TLP polypeptide”.

[0185] Motifs 1-1 to 7-1 were derived using the MEME algorithm (Bailey and Elkan, Proceedings of the Second International Conference on Intelligent Systems for Molecular Biology, pp. 28-36, AAAI Press, Menlo Park, Calif., 1994). At each position within a MEME motif, the residues are shown that are present in the query set of sequences with a frequency higher than 0.2. Residues within square brackets represent alternatives.

[0186] More preferably, the TLP polypeptide comprises in increasing order of preference, at least 1, at least 2, at least 3, at least 4, at least 5, at least 6, or all 7 motifs.

[0187] The following combinations of motifs are particularly preferred: Motif 1-1 and Motif 2-1; Motif 1-1 and Motif 3-1; Motif 2-1 and Motif 3-1; Motif 1-1, 2-1 and 3-1; Motif 1-1 and Motif 7-1; Motif 2-1 and Motif 7-1; Motif 1-1, 2-1 and 7-1; Motif 4-1 and Motif 2-1; Motif 4-1 and Motif 3-1; Motif 4-1, 2-1 and 3-1; Motif 4-1 and Motif 7-1; Motif 4-1, 2-1 and 7-1; Motif 1-1 and Motif 5-1; Motif 5-1 and Motif 3-1; Motif 1-1, 5-1 and 3-1. In the aforementioned list, Motif 1-1 may be replaced by Motif 1-1a), Motif 2-1 by Motif 2-1a), and Motif 4-1 by (Motif 4-1a) and/or Motif 4-1b)), see above.

[0188] Thus, the TLP polypeptide, preferably, may comprise
[0189] a. all of the following motifs:

(i) Motif 1-1: (SEQ ID NO: 35):
QLTIFY[AG]G[SM]V[NC]V[YF][DE][DN][IV]S[PA]EKAQ[AE][IL]M,
(ii) Motif 2-1: (SEQ ID NO: 37):
PQARKASLARFLEKRKERV[MT][NST][TAL][AS]PY,
(iii) Motif 3-1: (SEQ ID NO: 39):
MERDF[LM]GL[NGSI][IS]K[DEN][PS][LP][LA][VT][VI]K[DE]Exxx[SD][SG],
(iv) Motif 4-1 (SEQ ID NO: 40)
Q[LM]TIFY[AG]G[SMATL]V[NCS][VI][YF][DEN][DN][IV][STP][PAV][ED][KQ]A[QK][A
E][IL]MFLA[GS][HNR],
(v) Motif 5-1 (SEQ ID NO: 43):
RFLEKRKE
(vi) Motif 6-1 (SEQ ID NO: 44):
QLTIFY[AG]G
(vii) Motif 7-1 (SEQ ID NO: 45):
MERDF[LM]GL;

[0190] b. or all of the motifs 2-1 to 7-1 as defined in a. above, and in addition the Motif 1-1a) (SEQ ID NO: 36):
   [0191] QLTIFYGGMV[NC]V[YF]E[DN][IV]S[PA]EKAQ[AE][IL]M; or
[0192] c. all of the motifs 1-1 and 3-1 to 7-1 as defined in a. above, and in addition the Motif 2-1a) (SEQ ID NO: 38)
[0193] PQARKASLARFLEKRKERV[MT][NST]L[AS]PY; or
[0194] d. all of the motifs 1-1 to 7-1 as defined in a. above, wherein motif 4-1 is replaced by the Motif 4-1a) (SEQ ID NO: 41)
[0195] Q[LM]TIFY[AG]G[SMATL]V[NCS][VI][YF][DEN][DN][IV][STP][PAV][ED],
[0196] and/or Motif 4b) (SEQ ID NO: 42):
[0197] [KQ]A[QK][AE][IL]MFLA[GS][HNR]; or
[0198] e. all of the motifs 1-1a), 2-1a), 3-1, 4-1a) and 4-1b), 5-1 to 7-1 as defined in a. to d above; or
[0199] f. any three, preferably any four, more preferably any 5 motifs as defined in a. to d. above; or
[0200] g. any combination of motifs as defined in f. wherein Motifs 1-1, 2-1 and 4-1 are not present; or
[0201] h. any motif as defined in a. to d. above.

[0202] Additionally or alternatively, the TLP protein, or the homologue of a TLP protein, preferably, has in increasing order of preference at least 25%, 26%, 27%, 28%, 29%, 30%, 31%, 32%, 33%, 34%, 35%, 36%, 37%, 38%, 39%, 40%, 41%, 42%, 43%, 44%, 45%, 46%, 47%, 48%, 49%, 50%, 51%, 52%, 53%, 54%, 55%, 56%, 57%, 58%, 59%, 60%, 61%, 62%, 63%, 64%, 65%, 66%, 67%, 68%, 69%, 70%, 71%, 72%, 73%, 74%, 75%, 76%, 77%, 78%, 79%, 80%, 81%, 82%, 83%, 84%, 85%, 86%, 87%, 88%, 89%, 90%, 91%, 92%, 93%, 94%, 95%, 96%, 97%, 98%, or 99% overall sequence identity to the amino acid represented by SEQ ID NO: 2. Preferably, said TLP protein or said homologous protein comprises any one or more of the conserved motifs or domains, preferably one or more of the conserved motifs as outlined above. The overall sequence identity is determined using a global alignment algorithm, such as the Needleman Wunsch algorithm in the program GAP (GCG Wisconsin Package, Accelrys), preferably with default parameters and preferably with sequences of mature proteins (i.e. without taking into account secretion signals or transit peptides).

[0203] In one embodiment the sequence identity level is determined by comparison of the polypeptide sequences over the entire length of the sequence of SEQ ID NO: 2. In another embodiment the sequence identity level of a nucleic acid sequence is determined by comparison of the nucleic acid sequence over the entire length of the coding sequence of the sequence of SEQ ID NO: 1.

[0204] Compared to overall sequence identity, the sequence identity will generally be higher when only conserved domains or motifs are considered. Preferably the motifs in a TLP polypeptide have, in increasing order of preference, at least 70%, 71%, 72%, 73%, 74%, 75%, 76%, 77%, 78%, 79%, 80%, 81%, 82%, 83%, 84%, 85%, 86%, 87%, 88%, 89%, 90%, 91%, 92%, 93%, 94%, 95%, 96%, 97%, 98%, or 99% sequence identity to any one or more of the Motifs 1-1 to 7-1 as defined herein above (including Motifs 1a, 2a, 4a and 4b).

[0205] In a preferred embodiment a method is provided wherein said TLP polypeptide comprises a conserved domain with at least 70%, 71%, 72%, 73%, 74%, 75%, 76%, 77%, 78%, 79%, 80%, 81%, 82%, 83%, 84%, 85%, 86%, 87%, 88%, 89%, 90%, 91%, 92%, 93%, 94%, 95%, 96%, 97%, 98%, or 99% sequence identity to the conserved domain starting with amino acid 144 up to amino acid 178 in SEQ ID NO:2 and/or (preferably and) a conserved domain with at least 70%, 71%, 72%, 73%, 74%, 75%, 76%, 77%, 78%, 79%, 80%, 81%, 82%, 83%, 84%, 85%, 86%, 87%, 88%, 89%, 90%, 91%, 92%, 93%, 94%, 95%, 96%, 97%, 98%, or 99% sequence identity to the conserved domain starting with amino acid 282 up to amino acid 306 in SEQ ID NO:2.

[0206] The terms “domain”, “signature” and “motif” are defined in the “definitions” section herein.

[0207] In a preferred embodiment, the TLP polypeptide is selected from the group consisting of:
[0208] a) a polypeptide comprising a sequence, or consisting of a sequence as shown in SEQ ID NO: 2,
[0209] b) a polypeptide having, in increasing order of preference at least 50%, at least 60%, at least 70%, at least 80%, or at least 90% sequence identity to a polypeptide as represented by SEQ ID NO: 2,
[0210] c) a polypeptide encoded by a polynucleotide which hybridizes under stringent conditions to a polynucleotide having a sequence as shown in SEQ ID NO: 1, or with a complementary sequence of such a polynucleotide having a sequence as shown in SEQ ID NO: 1,
[0211] d) a polypeptide with the biological activity of the polypeptide as shown in SEQ ID NO: 2 or substantially the same biological activity of the polypeptide as shown in SEQ ID NO: 2; and
[0212] e) any combination of a.) to d) above.

[0213] Preferable, the TLP polypeptide comprises the domain and/or motifs as set forth herein above.

[0214] Preferably, the TLP polypeptide sequence which when used in the construction of a phylogenetic tree, such as the one depicted in FIG. 3, clusters within the sequences not more than 4, 3, or 2 hierarchical branch points away from the amino acid sequence represented by SEQ ID NO: 2 rather than with any other group.

[0215] Preferably, TLP polypeptides, when expressed in rice, increases yield-related traits according to the methods of the present invention as outlined in Example XI-1.

[0216] Accordingly, TLP polypeptides (at least in their native form) when expressed in a plant, in particular in a monocot plant such as rice, maize, wheat or sugarcane, preferably, increase at least one of the yield related traits selected from the group consisting of aboveground biomass, total seed yield, number of filled seeds, number of flowers per panicle, thousand kernel weight, seedling biomass, and plant height (as compared to a control plant). Preferably, said increase is an increase of at least 1%, of at least 2%, more preferably, of at least 3% and, most preferably, of at least 5%. Tools and techniques for measuring whether the yield related traits are increased are described in the Examples.

[0217] The present invention is illustrated by transforming plants with the nucleic acid sequence represented by SEQ ID NO: 1, encoding the polypeptide sequence of SEQ ID NO: 2. However, performance of the invention is not restricted to these sequences; the methods of the invention may advantageously be performed using any TLP-encoding nucleic acid or TLP polypeptide as defined herein.

[0218] Examples of nucleic acids encoding TLP polypeptides are given in Table A1 of the Examples section herein. Such nucleic acids are useful in performing the methods of the invention. The amino acid sequences given in Table A1 of the Examples section are example sequences of orthologues and paralogues of the TLP polypeptide represented by SEQ ID NO: 2, the terms “orthologues” and “paralogues” being as defined herein. Further orthologues and paralogues may readily be identified by performing a so-called reciprocal blast search as described in the definitions section; where the query sequence is SEQ ID NO: 1 or SEQ ID NO: 2, the second BLAST (back-BLAST) would be against tomato sequences.

[0219] Nucleic acid variants may also be useful in practising the methods of the invention. Examples of such variants include nucleic acids encoding homologues and derivatives of any one of the amino acid sequences given in Table A1 of the Examples section, the terms “homologue” and “derivative” being as defined herein. Also useful in the methods, constructs, plants, harvestable parts and products of the invention are nucleic acids encoding homologues and derivatives of orthologues or paralogues of any one of the amino acid sequences given in Table A1 of the Examples section. Homologues and derivatives useful in the methods of the present invention have substantially the same biological and functional activity as the unmodified protein from which they are derived. Further variants useful in practising the methods of the invention are variants in which codon usage is optimised or in which miRNA target sites are removed.

[0220] Further nucleic acid variants useful in practising the methods of the invention include portions of nucleic acids encoding TLP polypeptides, nucleic acids hybridising to nucleic acids encoding TLP polypeptides, splice variants of nucleic acids encoding TLP polypeptides, allelic variants of nucleic acids encoding TLP polypeptides and variants of nucleic acids encoding TLP polypeptides obtained by gene shuffling. The terms hybridising sequence, splice variant, allelic variant and gene shuffling are as described herein.

[0221] In one embodiment of the present invention the function of the nucleic acid sequences of the invention is to confer information for a protein that increases yield or yield related traits, when a nucleic acid sequence of the invention is transcribed and translated in a living plant cell.

[0222] Nucleic acids encoding TLP polypeptides need not be full-length nucleic acids, since performance of the methods of the invention does not rely on the use of full-length nucleic acid sequences. According to the present invention, there is provided a method for enhancing yield-related traits in plants, comprising introducing and expressing in a plant a portion of any one of the nucleic acid sequences given in Table A1 of the Examples section, or a portion of a nucleic acid encoding an orthologue, paralogue or homologue of any of the amino acid sequences given in Table A1 of the Examples section.

[0223] A portion of a nucleic acid may be prepared, for example, by making one or more deletions to the nucleic acid. The portions may be used in isolated form or they may be fused to other coding (or non-coding) sequences in order to, for example, produce a protein that combines several activities. When fused to other coding sequences, the resultant polypeptide produced upon translation may be bigger than that predicted for the protein portion.

[0224] Portions useful in the methods, constructs, plants, harvestable parts and products of the invention, encode a TLP polypeptide as defined herein, and have substantially the same biological activity as the amino acid sequences given in Table A1 of the Examples section. Preferably, the portion is a portion of any one of the nucleic acids given in Table A1 of the Examples section, or is a portion of a nucleic acid encoding an orthologue or paralogue of any one of the amino acid sequences given in Table A1 of the Examples section. Preferably the portion is at least 500, 550, 600, 650, 700, 750, 800, 850, 900, 950, 1000, 1050, 1100, 1150 or 1190 consecutive nucleotides in length, the consecutive nucleotides being of any one of the nucleic acid sequences given in Table A1 of the Examples section, or of a nucleic acid encoding an orthologue or paralogue of any one of the amino acid sequences given in Table A1 of the Examples section. Most preferably the portion is a portion of the nucleic acid of SEQ ID NO: 1. Preferably, the portion encodes a fragment of an amino acid sequence which comprises i) at least one motif from Motif 1-1 to 7-1 as specified elsewhere herein; and/or ii) a PF06200 Pfam domain and/or PF09425 Pfam domain; and/or iii) an Interpro domain IPR010399 and/or an Interpro domain IPR018467; and/or iii) has, in increasing order of preference, at least 70, 80, 90, or 95% sequence identity to SEQ ID NO: 2.

[0225] Another nucleic acid variant useful in the methods, constructs, plants, harvestable parts and products of the invention is a nucleic acid capable of hybridising, under reduced stringency conditions, preferably under stringent conditions, with a nucleic acid encoding a TLP polypeptide as defined herein, or with a portion as defined herein.

[0226] According to the present invention, there is provided a method for enhancing yield-related traits in plants, comprising introducing and expressing in a plant a nucleic acid capable of hybridizing to any one of the nucleic acids given in Table A1 of the Examples section, or comprising introducing and expressing in a plant a nucleic acid capable of hybridising to a nucleic acid encoding an orthologue, paralogue or homologue of any of the nucleic acid sequences given in Table A1 of the Examples section.

[0227] Hybridising sequences useful in the methods, constructs, plants, harvestable parts and products of the invention encode a TLP polypeptide as defined herein, having substantially the same biological activity as the amino acid sequences given in Table A1 of the Examples section. Preferably, the hybridising sequence is capable of hybridising to the complement of any one of the nucleic acids given in Table A1 of the Examples section, or to a portion of any of these sequences, a portion being as defined above, or the hybridising sequence is capable of hybridising to the complement of a nucleic acid encoding an orthologue or paralogue of any one of the amino acid sequences given in Table A1 of the Examples section. Most preferably, the hybridising sequence is capable of hybridising to the complement of a nucleic acid as represented by SEQ ID NO: 1 or to a portion thereof.

[0228] Preferably, the hybridising sequence encodes a polypeptide with an amino acid sequence which comprises i) at least one motif from Motif 1-1 to 7-1 as specified elsewhere herein; and/or ii) a PF06200 Pfam domain and/or PF09425 Pfam domain; and/or iii) an Interpro domain IPR010399 and/or an Interpro domain IPR018467; and/or iii) has, in increasing order of preference, at least 70, 80, 90, or 95% sequence identity to SEQ ID NO: 2.

[0229] In one embodiment the hybridising sequence is capable of hybridising to the complement of a nucleic acid as represented by SEQ ID NO: 1 or to a portion thereof under conditions of medium or high stringency, preferably high stringency as defined above. In another embodiment the hybridising sequence is capable of hybridising to the complement of a nucleic acid as represented by SEQ ID NO: 1 under stringent conditions.

[0230] Another nucleic acid variant useful in the methods, constructs, plants, harvestable parts and products of the invention is a splice variant encoding a TLP polypeptide as defined hereinabove, a splice variant being as defined herein.

[0231] According to the present invention, there is provided a method for enhancing yield-related traits in plants, comprising introducing and expressing in a plant a splice variant of any one of the nucleic acid sequences given in Table A1 of the Examples section, or a splice variant of a nucleic acid encoding an orthologue, paralogue or homologue of any of the amino acid sequences given in Table A1 of the Examples section.

[0232] Preferred splice variants are splice variants of a nucleic acid represented by SEQ ID NO: 1, or a splice variant of a nucleic acid encoding an orthologue or paralogue of SEQ ID NO: 2. Preferably, the amino acid sequence encoded by the splice variant comprises i) at least one motif from Motif 1-1 to 7-1 as specified elsewhere herein; and/or ii) a PF06200 Pfam domain and/or PF09425 Pfam domain; and/or iii) an Interpro domain IPR010399 and/or an Interpro domain IPR018467; and/or iii) has, in increasing order of preference, at least 70, 80, 90, or 95% sequence identity to SEQ ID NO: 2.

[0233] Another nucleic acid variant useful in performing the methods of the invention is an allelic variant of a nucleic acid encoding a TLP polypeptide as defined hereinabove, an allelic variant being as defined herein.

[0234] According to the present invention, there is provided a method for enhancing yield-related traits in plants, comprising introducing and expressing in a plant an allelic variant of any one of the nucleic acids given in Table A1 of the Examples section, or comprising introducing and expressing in a plant an allelic variant of a nucleic acid encoding an orthologue, paralogue or homologue of any of the amino acid sequences given in Table A1 of the Examples section.

[0235] The polypeptides encoded by allelic variants useful in the methods of the present invention have substantially the same biological activity as the TLP polypeptide of SEQ ID NO: 2 and any of the amino acids depicted in Table A1 of the Examples section. Allelic variants exist in nature, and encompassed within the methods of the present invention is the use of these natural alleles. Preferably, the allelic variant is an allelic variant of SEQ ID NO: 1 or an allelic variant of a nucleic acid encoding an orthologue or paralogue of SEQ ID NO: 2. Preferably, the amino acid sequence encoded by the allelic variant comprises i) at least one motif from Motif 1-1 to 7-1 as specified elsewhere herein; and/or ii) a PF06200 Pfam domain and/or PF09425 Pfam domain; and/or iii) an Interpro domain IPR010399 and/or an Interpro domain IPR018467; and/or iii) has, in increasing order of preference, at least 70, 80, 90, or 95% sequence identity to SEQ ID NO: 2.

[0236] Gene shuffling or directed evolution may also be used to generate variants of nucleic acids encoding TLP polypeptides as defined above; the term “gene shuffling” being as defined herein.

[0237] According to the present invention, there is provided a method for enhancing yield-related traits in plants, comprising introducing and expressing in a plant a variant of any one of the nucleic acid sequences given in Table A1 of the Examples section, or comprising introducing and expressing in a plant a variant of a nucleic acid encoding an orthologue, paralogue or homologue of any of the amino acid sequences given in Table A1 of the Examples section, which variant nucleic acid is obtained by gene shuffling.

[0238] Preferably, the amino acid sequence encoded by the variant nucleic acid obtained by gene shuffling comprises i) at least one motif from Motif 1-1 to 7-1 as specified elsewhere herein; and/or ii) a PF06200 Pfam domain and/or PF09425 Pfam domain; and/or iii) an Interpro domain IPR010399 and/or an Interpro domain IPR018467; and/or iii) has, in increasing order of preference, at least 70, 80, 90, or 95% sequence identity to SEQ ID NO: 2.

[0239] Furthermore, nucleic acid variants may also be obtained by site-directed mutagenesis. Several methods are available to achieve site-directed mutagenesis, the most common being PCR based methods (Current Protocols in Molecular Biology. Wiley Eds.).

[0240] Nucleic acids encoding TLP polypeptides may be derived from any natural or artificial source. The nucleic acid may be modified from its native form in composition and/or genomic environment through deliberate human manipulation. Preferably the TLP polypeptide-encoding nucleic acid is from a plant, further preferably from a dicotyledonous plant, more preferably from the family Solanaceae, even more preferably the nucleic acid is from the genus Solanum most preferably the nucleic acid is from Solanum lycopersicum (frequently, also referred to as Lycopersicum esculentum).

[0241] In another embodiment the present invention extends to recombinant chromosomal DNA comprising a nucleic acid sequence useful in the methods of the invention, wherein said nucleic acid is present in the chromosomal DNA as a result of recombinant methods, i.e. said nucleic acid is not in the chromosomal DNA in its native surrounding. Said recombinant chromosomal DNA may be a chromosome of native origin, with said nucleic acid inserted by recombinant means, or it may be a mini-chromosome or a non-native chromosomal structure, e.g. or an artificial chromosome. The nature of the chromosomal DNA may vary, as long it allows for stable passing on to successive generations of the recombinant nucleic acid useful in the methods, constructs, plants, harvestable parts and products of the invention, and allows for expression of said nucleic acid in a living plant cell resulting in increased yield or increased yield related traits of the plant cell or a plant comprising the plant cell.

[0242] In a further embodiment the recombinant chromosomal DNA of the invention is comprised in a plant cell. DNA comprised within a cell, particularly a cell with cell walls like a plant cell, is better protected from degradation than a bare nucleic acid sequence. The same holds true for a DNA construct comprised in a host cell, for example a plant cell.

[0243] Performance of the methods of the invention gives plants having enhanced yield-related traits. In particular performance of the methods of the invention gives plants having increased yield, especially increased seed yield relative to control plants. The terms “yield” and “seed yield” are described in more detail in the “definitions” section herein.

[0244] Reference herein to enhanced yield-related traits is taken to mean an increase early vigour and/or in biomass (weight) of one or more parts of a plant, which may include (i) aboveground parts and preferably aboveground harvestable parts and/or (ii) parts below ground and preferably harvestable below ground In particular, such harvestable parts are roots such as taproots, stems, beets, tubers, leaves, flowers or seeds, and performance of the methods of the invention results in plants having increased seed yield relative to the seed yield of control plants, and/or increased aboveground biomass, in particular stem biomass relative to the aboveground biomass, and in particular stem biomass of control plants, and/or increased root biomass relative to the root biomass of control plants and/or increased beet biomass relative to the beet biomass of control plants. Moreover, it is particularly contemplated that the sugar content (in particular the sucrose content) in the above ground parts, particularly stem (in particular of sugar cane plants) and/or in the be-lowground parts, in particular in roots including taproots and tubers, and/or in beets (in particular in sugar beets) is increased relative to the sugar content (in particular the sucrose con-tent) in corresponding part(s) of the control plant.

[0245] The present invention provides a method for increasing yield related traits, in particular aboveground biomass, total seed yield, number of filled seeds, number of flowers per panicle, thousand kernel weight, seedling biomass, and plant height relative to control plants, which method comprises modulating expression in a plant of a nucleic acid encoding a TLP polypeptide as defined herein.

[0246] According to a preferred feature of the present invention, performance of the methods of the invention gives plants having an increased growth rate relative to control plants. Therefore, according to the present invention, there is provided a method for increasing the growth rate of plants, which method comprises modulating expression in a plant of a nucleic acid encoding a TLP polypeptide as defined herein.

[0247] Performance of the methods of the invention gives plants grown under non-stress conditions or under mild drought conditions increased yield relative to control plants grown under comparable conditions. Therefore, according to the present invention, there is provided a method for increasing yield in plants grown under non-stress conditions or under mild drought conditions, which method comprises modulating expression in a plant of a nucleic acid encoding a TLP polypeptide.

[0248] Performance of the methods of the invention gives plants grown under conditions of drought, increased yield relative to control plants grown under comparable conditions. Therefore, according to the present invention, there is provided a method for increasing yield in plants grown under conditions of drought which method comprises modulating expression in a plant of a nucleic acid encoding a TLP polypeptide.

[0249] Performance of the methods of the invention gives plants grown under conditions of nutrient deficiency, particularly under conditions of nitrogen deficiency, increased yield relative to control plants grown under comparable conditions. Therefore, according to the present invention, there is provided a method for increasing yield in plants grown under conditions of nutrient deficiency, which method comprises modulating expression in a plant of a nucleic acid encoding a TLP polypeptide.

[0250] Performance of the methods of the invention gives plants grown under conditions of salt stress, increased yield relative to control plants grown under comparable conditions. Therefore, according to the present invention, there is provided a method for increasing yield in plants grown under conditions of salt stress, which method comprises modulating expression in a plant of a nucleic acid encoding a TLP polypeptide.

[0251] The invention also provides genetic constructs and vectors to facilitate introduction and/or expression in plants of nucleic acids encoding TLP polypeptides. The gene constructs may be inserted into vectors, which may be commercially available, suitable for transforming into plants and suitable for expression of the gene of interest in the transformed cells. The invention also provides use of a gene construct as defined herein in the methods of the invention.

[0252] More specifically, the present invention provides a construct comprising:

(a) a nucleic acid encoding a TLP polypeptide as defined above;
(b) one or more control sequences capable of driving expression of the nucleic acid sequence of (a); and optionally
(c) a transcription termination sequence.

[0253] Preferably, the nucleic acid encoding a TLP polypeptide is as defined above. The term “control sequence” and “termination sequence” are as defined herein.

[0254] The invention furthermore provides plants transformed with a construct as described above. In particular, the invention provides plants transformed with a construct as described above, which plants have increased yield-related traits as described herein.

[0255] Plants are transformed with a vector comprising any of the nucleic acids described above. The skilled artisan is well aware of the genetic elements that must be present on the vector in order to successfully transform, select and propagate host cells containing the sequence of interest. The sequence of interest is operably linked to one or more control sequences (at least to a promoter) in the vectors of the invention.

[0256] In one embodiment the plants of the invention are transformed with an expression cassette comprising any of the nucleic acids described above. The skilled artisan is well aware of the genetic elements that must be present on the expression cassette in order to successfully transform, select and propagate host cells containing the sequence of interest. In the expression cassettes of the invention the sequence of interest is operably linked to one or more control sequences (at least to a promoter). The promoter in such an expression cassette may be a non-native promoter to the nucleic acid described above, i.e. a promoter not regulating the expression of said nucleic acid in its native surrounding.

[0257] In one embodiment the terms expression cassettes of the invention, genetic construct and constructs of the invention are used exchangeably.

[0258] In a further embodiment the expression cassettes of the invention confer increased yield or yield related traits(s) to a living plant cell when they have been introduced into said plant cell and result in expression of the nucleic acid as defined above, comprised in the expression cassette(s). The promoter in such expression cassettes may be a non-native promoter to the nucleic acid described above, i.e. a promoter not regulating the expression of said nucleic acid in its native surrounding.

[0259] The expression cassettes of the invention may be comprised in a host cell, plant cell, seed, agricultural product or plant.

[0260] Advantageously, any type of promoter, whether natural or synthetic, may be used to drive expression of the nucleic acid sequence, but preferably the promoter is of plant origin. A constitutive promoter is particularly useful in the methods. Preferably the constitutive promoter is a ubiquitous constitutive promoter of medium strength. See the “Definitions” section herein for definitions of the various promoter types. Also useful in the methods of the invention is a root-specific promoter (e.g. when sugar beets are transformed).

[0261] It should be clear that the applicability of the present invention is not restricted to the TLP polypeptide-encoding nucleic acid represented by SEQ ID NO: 1, nor is the applicability of the invention restricted to expression of a TLP polypeptide-encoding nucleic acid when driven by a constitutive promoter, or when driven by a root-specific promoter.

[0262] The constitutive promoter is preferably a medium strength promoter. More preferably it is a plant derived promoter, such as a GOS2 promoter or a promoter of substantially the same strength and having substantially the same expression pattern (a functionally equivalent promoter), more preferably the promoter is the promoter GOS2 promoter from rice. Further preferably the constitutive promoter is represented by a nucleic acid sequence substantially similar to SEQ ID NO: 46, most preferably the constitutive promoter is as represented by SEQ ID NO: 46. See the “Definitions” section herein for further examples of constitutive promoters.

[0263] According to another preferred feature of the invention, the nucleic acid encoding a TLP polypeptide is operably linked to a root-specific promoter. The root-specific promoter is preferably an RCc3 promoter (Plant Mol Biol. 1995 January; 27(2):237-48).

[0264] In another preferred embodiment, the polynucleotide encoding the TLP polypeptide as used in the plants, constructs and methods of the present invention is linked to a promoter which allows for the expression, preferably the strongest expression in the aboveground parts of the plant as compared to the expression in other parts of the plant. This applies, in particular, if the plant is a monocot. As set forth elsewhere herein, preferred monocots are maize, wheat, rice, or sugarcane. In another preferred embodiment of the present invention, the polynucleotide encoding the TLP polypeptide as used in the plants, constructs and methods of the present invention is preferably linked to a promoter which allows for the expression, preferably the strongest expression in the belowground parts or beets of the plant as compared to the expression in other parts of the plant. This applies, in particular, if the plant is a dicot. Preferred dicots are sugar beet and potato. For example, if the plant is a sugar beet, the promoter, preferably, allows for the strongest expression in the taproot or beet as compared to the expression in other parts of the plant. In one embodiment the promoter used in for expression in sugar beets is, preferably a root specific, more preferably a taproot or beet specific promoter.

[0265] Optionally, one or more terminator sequences may be used in the construct introduced into a plant. Preferably, the construct comprises an expression cassette comprising a GOS2 promoter, substantially similar to SEQ ID NO: 46, operably linked to the nucleic acid encoding the TLP polypeptide. More preferably, the construct comprises a zein terminator (t-zein) linked to the 3′ end of the TLP coding sequence. Most preferably, the expression cassette comprises a sequence having in increasing order of preference at least 95%, at least 96%, at least 97%, at least 98%, at least 99% identity to the sequence represented by the pPRO::TLP::t-zein sequence (FIG. 5) comprised by the expression vector having the sequence as shown in SEQ ID NO: 47 (pPRO::TLP::t-zein sequence). Furthermore, one or more sequences encoding selectable markers may be present on the construct introduced into a plant.

[0266] According to a preferred feature of the invention, the modulated expression is increased expression. Methods for increasing expression of nucleic acids or genes, or gene products, are well documented in the art and examples are provided in the definitions section.

[0267] As mentioned above, a preferred method for modulating expression of a nucleic acid encoding a TLP polypeptide is by introducing and expressing in a plant a nucleic acid encoding a TLP polypeptide; however the effects of performing the method, i.e. enhancing yield-related traits may also be achieved using other well known techniques, including but not limited to T-DNA activation tagging, TILLING, homologous recombination. A description of these techniques is provided in the definitions section.

[0268] The invention also provides a method for the production of transgenic plants having enhanced yield-related traits, in particular aboveground biomass, total seed yield, number of filled seeds, number of flowers per panicle, thousand kernel weight, seedling biomass, and/or plant height, relative to control plants, comprising introduction and expression in a plant of any nucleic acid encoding a TLP polypeptide as defined hereinabove.

[0269] More specifically, the present invention provides a method for the production of transgenic plants having enhanced yield-related traits, particularly increased seed and biomass yield, more preferably aboveground biomass, total seed yield, number of filled seeds, number of flowers per panicle, thousand kernel weight, seedling biomass, and/or plant height, which method comprises:

(i) introducing and expressing in a plant or plant cell a TLP polypeptide-encoding nucleic acid or a genetic construct comprising a TLP polypeptide-encoding nucleic acid; and
(ii) cultivating the plant cell under conditions promoting plant growth and development.

[0270] Cultivating the plant cell under conditions promoting plant growth and development, may or may not include regeneration and or growth to maturity.

[0271] The nucleic acid of (i) may be any of the nucleic acids capable of encoding a TLP polypeptide as defined herein.

[0272] The nucleic acid may be introduced directly into a plant cell or into the plant itself (including introduction into a tissue, organ or any other part of a plant). According to a preferred feature of the present invention, the nucleic acid is preferably introduced into a plant by transformation. The term “transformation” is described in more detail in the “definitions” section herein.

[0273] In one embodiment the present invention clearly extends to any plant cell or plant produced by any of the methods described herein, and to all plant parts and propagules thereof. The present invention encompasses plants or parts thereof (including seeds) obtainable by the methods according to the present invention. The plants or parts thereof comprise a nucleic acid transgene encoding a TLP polypeptide as defined above. The present invention extends further to encompass the progeny of a primary transformed or transfected cell, tissue, organ or whole plant that has been produced by any of the aforementioned methods, the only requirement being that progeny exhibit the same genotypic and/or phenotypic characteristic(s) as those produced by the parent in the methods according to the invention.

[0274] The present invention also extends in another embodiment to transgenic plant cells and seed comprising the nucleic acid molecule of the invention in a plant expression cassette or a plant expression construct.

[0275] In a further embodiment the seed of the invention recombinantly comprise the expression cassettes of the invention, the (expression) constructs of the invention, the nucleic acids described above and/or the proteins encoded by the nucleic acids as described above.

[0276] A further embodiment of the present invention extends to plant cells comprising the nucleic acid as described above in a recombinant plant expression cassette.

[0277] In yet another embodiment the plant cells of the invention are non-propagative cells, e.g. the cells can not be used to regenerate a whole plant from this cell as a whole using standard cell culture techniques, this meaning cell culture methods but excluding in-vitro nuclear, organelle or chromosome transfer methods. While plants cells generally have the characteristic of totipotency, some plant cells can not be used to regenerate or propagate intact plants from said cells. In one embodiment of the invention the plant cells of the invention are such cells. In another embodiment the plant cells of the invention are plant cells that do not sustain themselves in an autotrophic way. One example are plant cells that do not sustain themselves through photosynthesis by synthesizing carbohydrate and protein from such inorganic substances as water, carbon dioxide and mineral salt.

[0278] In another embodiment the plant cells of the invention are plant cells that do not sustain themselves through photosynthesis by synthesizing carbohydrate and protein from such inorganic substances as water, carbon dioxide and mineral salt, i.e. they may be deemed non-plant variety. In a further embodiment the plant cells of the invention are non-plant variety and non-propagative.

[0279] The invention also includes host cells containing an isolated nucleic acid encoding a TLP polypeptide as defined hereinabove. Host cells of the invention may be any cell selected from the group consisting of bacterial cells, such as E. coli or Agrobacterium species cells, yeast cells, fungal, algal or cyanobacterial cells or plant cells. In one embodiment host cells according to the invention are plant cells, yeasts, bacteria or fungi. Host plants for the nucleic acids or the vector used in the method according to the invention, the expression cassette or construct or vector are, in principle, advantageously all plants, which are capable of synthesizing the polypeptides used in the inventive method.

[0280] In one embodiment the plant cells of the invention overexpress the nucleic acid molecule of the invention.

[0281] The invention also includes methods for the production of a product comprising a) growing the plants of the invention and b) producing said product from or by the plants of the invention or parts, including seeds, of these plants. In a further embodiment the methods comprises steps a) growing the plants of the invention, b) removing the harvestable parts as defined above from the plants and c) producing said product from or by the harvestable parts of the invention.

[0282] Examples of such methods would be growing corn plants of the invention, harvesting the corn cobs and remove the kernels. These may be used as feedstuff or processed to starch and oil as agricultural products.

[0283] The product may be produced at the site where the plant has been grown, or the plants or parts thereof may be removed from the site where the plants have been grown to produce the product. Typically, the plant is grown, the desired harvestable parts are removed from the plant, if feasible in repeated cycles, and the product made from the harvestable parts of the plant. The step of growing the plant may be performed only once each time the methods of the invention is performed, while allowing repeated times the steps of product production e.g. by repeated removal of harvestable parts of the plants of the invention and if necessary further processing of these parts to arrive at the product. It is also possible that the step of growing the plants of the invention is repeated and plants or harvestable parts are stored until the production of the product is then performed once for the accumulated plants or plant parts. Also, the steps of growing the plants and producing the product may be performed with an overlap in time, even simultaneously to a large extend, or sequentially. Generally the plants are grown for some time before the product is produced.

[0284] Advantageously the methods of the invention are more efficient than the known methods, because the plants of the invention have increased yield and/or stress tolerance to an environmental stress compared to a control plant used in comparable methods.

[0285] In one embodiment the products produced by said methods of the invention are plant products such as, but not limited to, a foodstuff, feedstuff, a food supplement, feed supplement, fiber, cosmetic or pharmaceutical. Foodstuffs are regarded as compositions used for nutrition or for supplementing nutrition. Animal feedstuffs and animal feed supplements, in particular, are regarded as foodstuffs.

[0286] In another embodiment the inventive methods for the production are used to make agricultural products such as, but not limited to, plant extracts, proteins, amino acids, carbohydrates, fats, oils, polymers, vitamins, and the like.

[0287] It is possible that a plant product consists of one ore more agricultural products to a large extent.

[0288] In yet another embodiment the polynucleotide sequences or the polypeptide sequences or the construct of the invention are comprised in an agricultural product.

[0289] In a further embodiment the nucleic acid sequences and protein sequences of the invention may be used as product markers, for example for an agricultural product produced by the methods of the invention. Such a marker can be used to identify a product to have been produced by an advantageous process resulting not only in a greater efficiency of the process but also improved quality of the product due to increased quality of the plant material and harvestable parts used in the process. Such markers can be detected by a variety of methods known in the art, for example but not limited to PCR based methods for nucleic acid detection or antibody based methods for protein detection.

[0290] The methods of the invention are advantageously applicable to any plant, in particular to any plant as defined herein. Plants that are particularly useful in the methods of the invention include all plants which belong to the superfamily Viridiplantae, in particular monocotyledonous and dicotyledonous plants including fodder or forage legumes, ornamental plants, food crops, trees or shrubs.

[0291] According to an embodiment of the present invention, the plant is a crop plant. Examples of crop plants include but are not limited to chicory, carrot, cassava, trefoil, soybean, beet, sugar beet, sunflower, canola, alfalfa, rapeseed, linseed, cotton, tomato, potato and tobacco.

[0292] According to another embodiment of the present invention, the plant is a monocotyledonous plant. Examples of monocotyledonous plants include sugarcane.

[0293] According to another embodiment of the present invention, the plant is a cereal. Examples of cereals include rice, maize, wheat, barley, millet, rye, triticale, sorghum, emmer, spelt, einkorn, teff, milo and oats.

[0294] In one embodiment the plants of the invention or used in the methods of the invention are selected from the group consisting of maize, wheat, rice, soybean, cotton, oilseed rape including canola, sugarcane, sugar beet and alfalfa.

[0295] In another preferred embodiment of the present invention the plants of the invention and the plants used in the methods of the invention are sugarbeet plants with increased biomass and/or increased sugar content of the beets. In a further preferred embodiment of the present invention the plants of the invention and the plants used in the methods of the invention are sugarcane plants with increased biomass and/or increased sugar content of the stem.

[0296] The invention also extends to harvestable parts of a plant such as, but not limited to seeds, leaves, roots, stems, fruits, flowers, stems, roots, rhizomes, tubers and bulbs, which harvestable parts comprise a recombinant nucleic acid encoding a TLP polypeptide. The invention furthermore relates to products derived or produced, preferably directly derived or directly produced, from a harvestable part of such a plant, such as dry pellets or powders, oil, fat and fatty acids, sugars (in particular sucrose) starch or proteins. In one embodiment the product comprises a recombinant nucleic acid encoding a TLP polypeptide and/or a recombinant TLP polypeptide for example as an indicator of the particular quality of the product.

[0297] The present invention also encompasses use of nucleic acids encoding TLP polypeptides as described herein and use of these TLP polypeptides in enhancing any of the aforementioned yield-related traits in plants. For example, nucleic acids encoding TLP polypeptide described herein, or the TLP polypeptides themselves, may find use in breeding programmes in which a DNA marker is identified which may be genetically linked to a TLP polypeptide-encoding gene. The nucleic acids/genes, or the TLP polypeptides themselves may be used to define a molecular marker. This DNA or protein marker may then be used in breeding programmes to select plants having enhanced yield-related traits as defined hereinabove in the methods of the invention. Furthermore, allelic variants of a TLP polypeptide-encoding nucleic acid/gene may find use in marker-assisted breeding programmes. Nucleic acids encoding TLP polypeptides may also be used as probes for genetically and physically mapping the genes that they are a part of, and as markers for traits linked to those genes. Such information may be useful in plant breeding in order to develop lines with desired phenotypes.

[0298] In one embodiment any comparison to determine sequence identity percentages is performed
[0299] in the case of a comparison of nucleic acids over the entire coding region of SEQ ID NO: 1, or
[0300] in the case of a comparison of polypeptide sequences over the entire length of SEQ ID NO: 2.

[0301] For example, a sequence identity of 50% sequence identity in this embodiment means that over the entire coding region of SEQ ID NO: 1, 50 percent of all bases are identical between the sequence of SEQ ID NO: 1 and the related sequence. Similarly, in this embodiment a polypeptide sequence is 50% identical to the polypeptide sequence of SEQ ID NO: 2, when 50 percent of the amino acids residues of the sequence as represented in SEQ ID NO: 2, are found in the polypeptide tested when comparing from the starting methionine to the end of the sequence of SEQ ID NO: 2.

[0302] In a further embodiment the nucleic acid sequence employed in the invention are those sequences that are not the polynucleotides encoding the proteins selected from the group consisting of the proteins listed in Table A1, and those of at least 60, 70, 75, 80, 85, 90, 93, 95, 98 or 99% nucleotide identity when optimally aligned to the sequences encoding the proteins listed in Table A1.

[0303] In one embodiment, the sequence of the nucleic acid encoding said TLP polypeptide or the sequence of the TLP polypeptide is, preferably, not the sequence as shown in SEQ ID NO: 63278 as disclosed in US2007/061916, SEQ ID NO: 214797 as disclosed in US20040214272, SEQ ID NO 51042 as disclosed in US20040172684, and/or SEQ ID NO 70406 as disclosed in US20040034888.

### C-2. PMP22 Polypeptide (22 kDa Peroxisomal Membrane Like Polypeptide)

[0304] Surprisingly, it has now been found that modulating expression in a plant of a nucleic acid encoding a PMP22 polypeptide gives plants having enhanced yield-related traits relative to control plants.

[0305] According to a first embodiment, the present invention provides a method for enhancing yield-related traits in plants relative to control plants, comprising modulating expression in a plant of a nucleic acid encoding a PMP22 polypeptide and optionally selecting for plants having enhanced yield-related traits. According to another embodiment, the present invention provides a method for producing plants having enhancing yield-related traits relative to control plants, wherein said method comprises the steps of modulating expression in said plant of a nucleic acid encoding a PMP22 polypeptide as described herein and optionally selecting for plants having enhanced yield-related traits.

[0306] A preferred method for modulating (preferably, increasing) expression of a nucleic acid encoding a PMP22 polypeptide is by introducing and expressing in a plant a nucleic acid encoding a PMP22 polypeptide.

[0307] Any reference hereinafter in section C-2 to a “protein useful in the methods of the invention” is taken to mean a PMP22 polypeptide as defined herein. Any reference hereinafter to a “nucleic acid useful in the methods of the invention” is taken to mean a nucleic acid capable of encoding such a PMP22 polypeptide. In one embodiment any reference to a protein or nucleic acid “useful in the methods of the invention” is to be understood to mean proteins or nucleic acids “useful in the methods, constructs, plants, harvestable parts and products of the invention”. The nucleic acid to be introduced into a plant (and therefore useful in performing the methods of the invention) is any nucleic acid encoding the type of protein which will now be described, hereafter also named “PMP22 nucleic acid” or “PMP22 gene”.

[0308] A “PMP22 polypeptide” as defined herein, preferably, refers to any polypeptide comprising an Interpro domain having the Interpro Accession number IPR007248 (Mpv17/PMP22). “PMP22” is the abbreviation for “22 kDa Peroxisomal Membrane like protein”. Thus, a PMP22 polypeptide is, preferably, a 22 kDa Peroxisomal Membrane like protein. More preferably, it is a 22 kDa Peroxisomal Membrane protein.

[0309] Additionally or alternatively, a “PMP22 polypeptide”, preferably, refers to any polypeptide comprising a Pfam domain having the Pfam accession number PF04117 (PF04117, Mpv17/PMP22 domain).

[0310] The Pfam domains as referred to herein are, preferably, based on the Pfam database, Release 24.0 (Pfam 24.0, October 2009), see also The Pfam protein families database: R. D. Finn, J. Mistry, J. Tate, P. Coggill, A. Heger, J. E. Pollington, O. L. Gavin, P. Gunesekaran, G. Ceric, K. Forslund, L. Holm, E. L. Sonnhammer, S. R. Eddy, A. Bateman Nucleic Acids Research (2010) Database Issue 38:D211-222.

[0311] Preferably, the Pfam domain having the Pfam accession number PF04117 (also referred to as “PF04117 pfam domain” or “PF04117 domain” herein) comprises a sequence having at least 70%, 71%, 72%, 73%, 74%, 75%, 76%, 77%, 78%, 79%, 80%, 81%, 82%, 83%, 84%, 85%, 86%, 87%, 88%, 89%, 90%, 91%, 92%, 93%, 94%, 95%, 96%, 97%, 98%, 99% or 100% sequence identity to the conserved domain starting with amino acid 283 up to amino acid 348 in SEQ ID NO:51.

[0312] The Interpro- and Pfam-domains as referred to herein are, preferably, based on the InterPro database, Release 31.0 (9 Feb. 2011).

[0313] As set forth above, the PMP22 is the abbreviation for “22 kDa Peroxisomal Membrane protein”. However, it is envisaged that the PMP22 polypeptide in the context of the present invention may have a molecular weight that differs from 22 kDa.

[0314] Preferably, the PMP22 polypeptide additionally or alternatively comprises one or more of the following motifs (see also FIG. 6):

Motif 1-2 (SEQ ID NO: 126):
GDWIAQC[YF]EGKPLFE[FI]DR[AT]RM[FL]RSGLVGFTLHGSLSHYYY[QH]FCE[AE]LFPF[QKE]
Motif 2-2 (SEQ ID NO: 127):
LTID[HQ]DYWHGWT[LI][FY]EILRY[AM]P[QE]HNW[VSI]AYE[EQ]ALK[RTA]NPVLAKM
Motif 3-2 (SEQ ID NO: 128):
[DE]WWVVP[AV]KVAFDQT[VA]W[SA]A[IV]WN
Motif 4-2 (SEQ ID NO: 129):
LVGFTLHGSLSHYYY[QH][FIL]CEALFPF[QKE][DE]WWVVP[AV]KVAFDQT[VI]WSAIWNSIYF
Motif 5-2 (SEQ ID NO: 130):
RY[AM]P[EQ]HNW[ISV]AYE[EQ]ALK[AR]NPVLAKM[VAM]ISG[VI]VYS[LIV]GDWIAQCYEGKP[L
I]F[ED][FI]D
Motif 6-2 (SEQ ID NO: 131):
AHL[IV]TYG[VL][IV]PVEQRLLWVDC
Motif 7-2 (SEQ ID NO: 132):
RYAPQHNW[IV]AYEEALK[RQ+NPVLAKMVISGVVYS[VL]GDWIAQCYEGKPLF[ED][IF]D
Motif 8-2 (SEQ ID NO: 133):
GFTLHGSLSH[YF]YYQFCE[AE]LFPF[QE]DWWVVP[VA]KVAFDQTVWSAIWNSIY[FY]TV
Motif 9-2 (SEQ ID NO: 134):
F[LW]PMLTAGWKLWPFAHLITYG[VL][VI]PVEQRLLWVDCVEL[IV]WVTILSTYSNEK

[0315] The term “PMP22” or “PMP22 polypeptide” as used herein also intends to include homologues as defined hereunder of “PMP22 polypeptide”.

[0316] Motifs 1-2 to 9-2 were derived using the MEME algorithm (Bailey and Elkan, Proceedings of the Second International Conference on Intelligent Systems for Molecular Biology, pp. 28-36, AAAI Press, Menlo Park, Calif., 1994). At each position within a MEME motif, the residues are shown that are present in the query set of sequences with a frequency higher than 0.2. Residues within square brackets represent alternatives. Motifs 1-2 to 3-2 were derived when using MEME for all polypeptides shown in Table A2 (Cluster A, B and C). Motifs 4-2 to 6-2 were derived when using MEME for all polypeptides with SEQ ID NO: 51 to 97 (Cluster A and B) shown in Table A2. Motifs 4-2 to 6-2 were derived when using MEME for all polypeptides with SEQ ID NO: 51 to 65 (Cluster A) shown in Table A2.

[0317] In one preferred embodiment, the PMP22 polypeptide comprises one or more motifs selected from Motif 1-2, Motif 2-2, and Motif 3-2. Preferably, the PMP22 polypeptide comprises Motifs 1-2 and 2-2, or Motifs 2-2 and 3-2, or Motifs 1-2 and 3-2, or Motifs 1-2, 2-2 and 3-2.

[0318] In a further preferred embodiment, the PMP22 polypeptide comprises one or more motifs selected from Motif 4-2, Motif 5-2, and Motif 6-2. Preferably, the PMP22 polypeptide comprises Motifs 4-2 and 5-2, or Motifs 5-2 and 6-2, or Motifs 4-2 and 6-2, or, more preferably, Motifs 4-2, 5-2 and 6-2.

[0319] In an even further preferred embodiment, the PMP22 polypeptide comprises one or more motifs selected from Motif 7-2, Motif 8-2, and Motif 9-2. Preferably, the PMP22 polypeptide comprises Motifs 7-2 and 8-2, or Motifs 8-2 and 9-2, or Motifs 7-2 and 9-2, or, more preferably, Motifs 7-2, 8-2 and 9-2.

[0320] More preferably, the PMP22 polypeptide comprises in increasing order of preference, at least 2, at least 3, at least 4, at least 5, at least 6, at least 7, at least 8, or all 9 motifs.

[0321] Thus, the PMP22 polypeptide, preferably, may comprise:
[0322] a. all of the following motifs:

Motif 1-2 (SEQ ID NO: 126):
GDWIAQC[YF]EGKPLFE[FI]DR[AT]RM[FL]RSGLVGFTLHGSLSHYYY[QH]FC
E[AE]LFPF[QKE]
Motif 2-2 (SEQ ID NO: 127):
LTID[HQ]DYWHGWT[LI][FY]EILRY[AM]P[QE]HNW[VSI]AYE[EQ]ALK[RTA]NP
VLAKM
Motif 3-2 (SEQ ID NO: 128):
[DE]WWVVP[AV]KVAFDQT[VA]W[SA]A[IV]WN
Motif 4-2 (SEQ ID NO: 129):
LVGFT-
LHGSLSHYYY[QH][FIL]CEALFPF[QKE][DE]WWVVP[AV]KVAFDQT[VI]WSAIW
NSIYF
Motif 5-2 (SEQ ID NO: 130):
RY[AM]P[EQ]HNW[ISV]AYE[EQ]ALK[AR]NPVLAKM[VAM]ISG[VI]VYS[LIV]GD
WIAQCYEGKP[LI]F[ED][FI]D
Motif 6-2 (SEQ ID NO: 131):
AHL[IV]TYG[VL][IV]PVEQRLLWVDC
Motif 7-2 (SEQ ID NO: 132):
RYAPQHNW[IV]AYEEALK[RQ]NPVLAKMVISGVVYS[VL]GDWIAQCYEGKPLF
[ED][IF]D
Motif 8-2 (SEQ ID NO: 133):
GFT-
LHGSLSH[YF]YYQFCE[AE]LFPF[QE]DWWVVP[VA]KVAFDQTVWSAIWNSIY
[FY]TV
Motif 9-2 (SEQ ID NO: 134):
F[LW]PMLTAGWKLWPFAHLITYG[VL][VI]PVEQRLLWVDCVEL[IV]WVTILSTY
SNEK;

[0323] or
[0324] b. at least one of the Motifs 7-2 to 9-2, preferably any two of Motifs 7-2 to 9-2, more preferably all three of Motifs 7-2 to 9-2 as defined in a. above; or
[0325] c. at least one of the Motifs 4-2 to 6-2, preferably any two of the Motifs 4-2 to 6-2, more preferably all three of the Motifs 4-2 to 6-2 as defined in a. above; or
[0326] d. at least one of the Motifs 1-2 to 3-2, preferably any two of the Motifs 1-2 to 3-2, more preferably all three of the Motifs 1-2 to 3-2 as defined in a. above; or
[0327] e. any four of the Motifs 1-2 to 9-2, preferably any five of the Motifs 1-2 to 9-2 as defined in a. above; or
[0328] f. any six of the Motifs 1-2 to 9-2, preferably any seven of the Motifs 1-2 to 9-2, more preferably any eight of the Motifs 1-2 to 9-2 as defined in a. above.

[0329] Additionally or alternatively, the PMP22 polypeptide or the homologue of a PMP22 protein, preferably, has in increasing order of preference at least 25%, 26%, 27%, 28%, 29%, 30%, 31%, 32%, 33%, 34%, 35%, 36%, 37%, 38%, 39%, 40%, 41%, 42%, 43%, 44%, 45%, 46%, 47%, 48%, 49%, 50%, 51%, 52%, 53%, 54%, 55%, 56%, 57%, 58%, 59%, 60%, 61%, 62%, 63%, 64%, 65%, 66%, 67%, 68%, 69%, 70%, 71%, 72%, 73%, 74%, 75%, 76%, 77%, 78%, 79%, 80%, 81%, 82%, 83%, 84%, 85%, 86%, 87%, 88%, 89%, 90%, 91%, 92%, 93%, 94%, 95%, 96%, 97%, 98%, or 99% overall sequence identity to the amino acid represented by SEQ ID NO: 51. Preferably, said PMP22 polypeptide comprises the Pfam domain, and/or the Interpro domain and/or one or more conserved motifs as outlined above. The overall sequence identity is determined using a global alignment algorithm, such as the Needleman Wunsch algorithm in the program GAP (GCG Wisconsin Package, Accelrys), preferably with default parameters and preferably with sequences of mature proteins (i.e. without taking into account secretion signals or transit peptides).

[0330] In one embodiment the sequence identity level is determined by comparison of the polypeptide sequences over the entire length of the sequence of SEQ ID NO: 51. In another embodiment the sequence identity level of a nucleic acid sequence is determined by comparison of the nucleic acid sequence over the entire length of the coding sequence of the sequence of SEQ ID NO: 50.

[0331] Compared to overall sequence identity, the sequence identity will generally be higher when only conserved domains or motifs are considered. Preferably the motifs in a PMP22 polypeptide have, in increasing order of preference, at least 70%, 71%, 72%, 73%, 74%, 75%, 76%, 77%, 78%, 79%, 80%, 81%, 82%, 83%, 84%, 85%, 86%, 87%, 88%, 89%, 90%, 91%, 92%, 93%, 94%, 95%, 96%, 97%, 98%, or 99% sequence identity to any one or more of the motifs represented by SEQ ID NO: 126 to SEQ ID NO: 134 (Motifs 1-2 to 9-2).

[0332] In other words, in another embodiment a method is provided wherein said PMP22 polypeptide comprises a conserved domain or motif with at least 70%, 71%, 72%, 73%, 74%, 75%, 76%, 77%, 78%, 79%, 80%, 81%, 82%, 83%, 84%, 85%, 86%, 87%, 88%, 89%, 90%, 91%, 92%, 93%, 94%, 95%, 96%, 97%, 98%, or 99% sequence identity to the conserved PF04117 domain. Preferably, said conserved PF04117 domain is starting with amino acid 283 up to amino acid 348 in SEQ ID NO:51.

[0333] In a preferred embodiment of the present invention, the PMP22 polypeptide to be used in the context of the present invention is selected from the group consisting of:
[0334] (i) a polypeptide comprising a sequence, or consisting of a sequence as shown in SEQ ID NO: 51, 57, 91 or 105,
[0335] (ii) a polypeptide having, in an increasing order of preference, at least 60%, 61%, 62%, 63%, 64%, 65%, 66%, 67%, 68%, 69%, 70%, 71%, 72%, 73%, 74%, 75%, 76%, 77%, 78%, 79%, 80%, 81%, 82%, 83%, 84%, 85%, 86%, 87%, 88%, 89%, 90%, 91%, 92%, 93%, 94%, 95%, 96%, 97%, 98%, or 99% sequence identity to a polypeptide as represented by SEQ ID NO: 51, 57, 91 or 105 when compared over the entire length of the amino acid sequence as represented by SEQ ID NO: 51, 57, 91 or 105, respectively,
[0336] (iii) a polypeptide encoded by a polynucleotide which hybridizes under stringent conditions to a polynucleotide having a sequence as shown in SEQ ID NO: 50, 56, 90, or 104 or with a complementary sequence of such a polynucleotide having a sequence as shown in SEQ ID NO: 50, 56, 90, or 104;
[0337] (vi) a polypeptide with the biological activity of the polypeptide as shown in SEQ ID NO: 51, 57, 91 or 105 or substantially the same biological activity of the polypeptide as shown in SEQ ID NO: 51, 57, 91 or 105; and
[0338] (v) any combination of (i) to (iv) above.

[0339] Preferably, the PMP22 polypeptide comprise the domains and/or motifs as set forth herein above.

[0340] The terms “domain”, “signature” and “motif” are defined in the “definitions” section herein.

[0341] In one embodiment, the sequence of the nucleic acid encoding said PMP22 polypeptide or the sequence of the PMP22 polypeptide is not the sequence as shown in SEQ ID NO: 20 as disclosed in WO2004/035798, as shown in SEQ ID NO: 5180 as disclosed in EP 1 586 645 A2, as shown in SEQ ID NO: 277535 as disclosed in US2004031072, as shown in SEQ ID NO: 42604 as disclosed in JP2005185101, as shown in SEQ ID NO: 302211 as disclosed in US2004214272, SEQ ID NO: 6940 as disclosed in US2009019601, or SEQ ID NO: 69977 or SEQ ID NO: 51830 as disclosed in US2007011783. Moreover, said sequence is, preferably, not SEQ ID NO: 34117 as disclosed in CA2300693, and/or not SEQ ID NO: 91119 as disclosed in US20070061916.

[0342] In one embodiment, the sequence of the nucleic acid encoding said PMP22 polypeptide or the sequence of the PMP22 polypeptide is, preferably, not the sequence as shown in SEQ ID NO 40059 as disclosed in US20080148432, SEQ ID NO: 168858 as disclosed in US20040123343, and/or SEQ ID NO: 168851 as disclosed in US20040123343.

[0343] Preferably, the polypeptide sequence which when used in the construction of a phylogenetic tree, such as the one depicted in FIG. 8, clusters with the group of PMP22 polypeptides comprising the amino acid sequence represented by SEQ ID NO: 51 rather than with any other group (Cluster A).

[0344] In addition, PMP22 polypeptides, when expressed in a monocot plant such as rice, maize, wheat or sugarcane according to the methods of the present invention as outlined in Examples 7 and 8, give plants having increased yield related traits, in particular under-non stress conditions aboveground biomass (AreaMax), number of flowers per panicle (flowerperpan), thousand kernel weight (TKW) and/or under nitrogen deficiency increased seed fillrate (number of filled seeds over the number of florets), number of flowers per panicle (flowerperpan), and thousand kernel weight (TKW).

[0345] The present invention is illustrated by transforming plants with the nucleic acid sequence represented by SEQ ID NO: 50, encoding the polypeptide sequence of SEQ ID NO: 51. However, performance of the invention is not restricted to these sequences; the methods of the invention may advantageously be performed using any PMP22-encoding nucleic acid or PMP22 polypeptide as defined herein.

[0346] Examples of nucleic acids encoding PMP22 polypeptides are given in Table A2 of the Examples section herein. Such nucleic acids are useful in performing the methods of the invention. The amino acid sequences given in Table A2 of the Examples section are example sequences of orthologues and paralogues of the PMP22 polypeptide represented by SEQ ID NO: 51, the terms “orthologues” and “paralogues” being as defined herein. Further orthologues and paralogues may readily be identified by performing a so-called reciprocal blast search as described in the definitions section; where the query sequence is SEQ ID NO: 50 or SEQ ID NO: 51, the second BLAST (back-BLAST) would be against Lycopersicon esculentum sequences.

[0347] The invention also provides hitherto unknown PMP22-encoding nucleic acids and PMP22 polypeptides useful for conferring enhanced yield-related traits in plants relative to control plants.

[0348] According to a further embodiment of the present invention, there is therefore provided an isolated nucleic acid molecule selected from:
[0349] (i) a nucleic acid represented by SEQ ID NO: 50, 56, 90, or 104;
[0350] (ii) the complement of a nucleic acid represented by SEQ ID NO: 50, 56, 90, or 104;
[0351] (iii) a nucleic acid encoding a PMP22 polypeptide having in increasing order of preference at least 50%, 51%, 52%, 53%, 54%, 55%, 56%, 57%, 58%, 59%, 60%, 61%, 62%, 63%, 64%, 65%, 66%, 67%, 68%, 69%, 70%, 71%, 72%, 73%, 74%, 75%, 76%, 77%, 78%, 79%, 80%, 81%, 82%, 83%, 84%, 85%, 86%, 87%, 88%, 89%, 90%, 91%, 92%, 93%, 94%, 95%, 96%, 97%, 98%, 99%, or 100% sequence identity to the amino acid sequence represented by SEQ ID NO: 51, 57, 91 or 105, and further preferably conferring enhanced yield-related traits relative to control plants.
[0352] (iv) a nucleic acid molecule which hybridizes with a nucleic acid molecule of (i) to (iii) under high stringency hybridization conditions and preferably confers enhanced yield-related traits relative to control plants.

[0353] Preferably, said PMP22 polypeptide encoded by said nucleic acid comprises a Pfam domain having the accession number PF04117. Additionally or alternatively, said PMP22 polypeptide comprises an Interpro domain having the accession number IPR007248. It is also preferred that said PMP22 polypeptide comprises—additionally or alternatively—one or more of Motifs 1-2 to 9-2. Preferred combinations of Motifs 1-2 to 9-2 are disclosed herein above.

[0354] According to a further embodiment of the present invention, there is also provided an isolated polypeptide selected from:
[0355] (i) an amino acid sequence represented by SEQ ID NO: 57, 91 or 105;
[0356] (ii) an amino acid sequence having, in increasing order of preference, at least 50%, 51%, 52%, 53%, 54%, 55%, 56%, 57%, 58%, 59%, 60%, 61%, 62%, 63%, 64%, 65%, 66%, 67%, 68%, 69%, 70%, 71%, 72%, 73%, 74%, 75%, 76%, 77%, 78%, 79%, 80%, 81%, 82%, 83%, 84%, 85%, 86%, 87%, 88%, 89%, 90%, 91%, 92%, 93%, 94%, 95%, 96%, 97%, 98%, or 99% sequence identity to the amino acid sequence represented by SEQ ID NO: 57, 91 or 105, and preferably conferring enhanced yield-related traits relative to control plants; and
[0357] (iii) derivatives of any of the amino acid sequences given in (i) or (ii) above.

[0358] Preferably, said polypeptide comprises a Pfam domain having the accession number PF04117. Additionally or alternatively, said polypeptide comprises an Interpro domain having the accession number IPR007248. It is also preferred that said polypeptide comprises—additionally or alternatively—one or more of Motifs 1-2 to 9-2. Preferred combinations of Motifs 1-2 to 9-2 are disclosed herein above.

[0359] According to a further embodiment of the present invention, there is therefore provided an isolated nucleic acid molecule selected from:

(i) a nucleic acid represented by any one of SEQ ID NO: 56, 90, and 104;
(ii) the complement of a nucleic acid represented by (any one of) SEQ ID NO: 56, 90, and 104;
(iii) a nucleic acid encoding the polypeptide as represented by any one of SEQ ID NO: 57, 91, and 105, preferably as a result of the degeneracy of the genetic code, said isolated nucleic acid can be derived from a polypeptide sequence as represented by any one of SEQ ID NO: 57, 91, and 105 and further preferably confers enhanced yield-related traits relative to control plants;
(iv) a nucleic acid having, in increasing order of preference at least 30%, 31%, 32%, 33%, 34%, 35%, 36%, 37%, 38%, 39%, 40%, 41%, 42%, 43%, 44%, 45%, 46%, 47%, 48%, 49%, 50%, 51%, 52%, 53%, 54%, 55%, 56%, 57%, 58%, 59%, 60%, 61%, 62%, 63%, 64%, 65%, 66%, 67%, 68%, 69%, 70%, 71%, 72%, 73%, 74%, 75%, 76%, 77%, 78%, 79%, 80%, 81%, 82%, 83%, 84%, 85%, 86%, 87%, 88%, 89%, 90%, 91%, 92%, 93%, 94%, 95%, 96%, 97%, 98%, or 99% sequence identity with any of the nucleic acid sequences of Table A2 and further preferably conferring enhanced yield-related traits relative to control plants;
(v) a nucleic acid molecule which hybridizes with a nucleic acid molecule of (i) to (iv) under stringent hybridization conditions and preferably confers enhanced yield-related traits relative to control plants;
(vi) a nucleic acid encoding a PMP22 polypeptide having, in increasing order of preference, at least 50%, 51%, 52%, 53%, 54%, 55%, 56%, 57%, 58%, 59%, 60%, 61%, 62%, 63%, 64%, 65%, 66%, 67%, 68%, 69%, 70%, 71%, 72%, 73%, 74%, 75%, 76%, 77%, 78%, 79%, 80%, 81%, 82%, 83%, 84%, 85%, 86%, 87%, 88%, 89%, 90%, 91%, 92%, 93%, 94%, 95%, 96%, 97%, 98%, or 99% sequence identity to the amino acid sequence represented by any one of SEQ ID NO: 57, 91 and 105 and any of the other amino acid sequences in Table A2 and preferably conferring enhanced yield-related traits relative to control plants.

[0360] Preferably, said polypeptide encoded by said nucleic acid comprises a Pfam domain having the accession number PF04117. Additionally or alternatively, said polypeptide comprises an Interpro domain having the accession number IPR007248. It is also preferred that said polypeptide comprises—additionally or alternatively—one or more of Motifs 1-2 to 9-2. Preferred combinations of Motifs 1-2 to 9-2 are disclosed herein above.

[0361] According to a further embodiment of the present invention, there is also provided an isolated polypeptide selected from:

(i) an amino acid sequence represented by any one of SEQ ID NO: 57, 91 and 105;
(ii) an amino acid sequence having, in increasing order of preference, at least 50%, 51%, 52%, 53%, 54%, 55%, 56%, 57%, 58%, 59%, 60%, 61%, 62%, 63%, 64%, 65%, 66%, 67%, 68%, 69%, 70%, 71%, 72%, 73%, 74%, 75%, 76%, 77%, 78%, 79%, 80%, 81%, 82%, 83%, 84%, 85%, 86%, 87%, 88%, 89%, 90%, 91%, 92%, 93%, 94%, 95%, 96%, 97%, 98%, or 99% sequence identity to the amino acid sequence represented by any one of SEQ ID NO: 57, 91 and 105 and any of the other amino acid sequences in Table A2 and preferably conferring enhanced yield-related traits relative to control plants.
(iii) derivatives of any of the amino acid sequences given in (i) or (ii) above.

[0362] Preferably, said polypeptide comprises a Pfam domain having the accession number PF04117. Additionally or alternatively, said polypeptide comprises an Interpro domain having the accession number IPR007248. It is also preferred that said polypeptide comprises—additionally or alternatively—one or more of Motifs 1-2 to 9-2. Preferred combinations of Motifs 1-2 to 9-2 are disclosed herein above.

[0363] Nucleic acid variants may also be useful in practising the methods of the invention. Examples of such variants include nucleic acids encoding homologues and derivatives of any one of the amino acid sequences given in Table A2 of the Examples section, the terms “homologue” and “derivative” being as defined herein. Also useful in the methods, constructs, plants, harvestable parts and products of the invention are nucleic acids encoding homologues and derivatives of orthologues or paralogues of any one of the amino acid sequences given in Table A2 of the Examples section. Homologues and derivatives useful in the methods of the present invention have substantially the same biological and functional activity as the unmodified protein from which they are derived. Further variants useful in practising the methods of the invention are variants in which codon usage is optimised or in which miRNA target sites are removed.

[0364] Further nucleic acid variants useful in practising the methods of the invention include portions of nucleic acids encoding PMP22 polypeptides, nucleic acids hybridising to nucleic acids encoding PMP22 polypeptides, splice variants of nucleic acids encoding PMP22 polypeptides, allelic variants of nucleic acids encoding PMP22 polypeptides and variants of nucleic acids encoding PMP22 polypeptides obtained by gene shuffling. The terms hybridising sequence, splice variant, allelic variant and gene shuffling are as described herein.

[0365] In one embodiment of the present invention the function of the nucleic acid sequences of the invention is to confer information for a protein that increases yield or yield related traits, when a nucleic acid sequence of the invention is transcribed and translated in a living plant cell.

[0366] Nucleic acids encoding PMP22 polypeptides need not be full-length nucleic acids, since performance of the methods of the invention does not rely on the use of full-length nucleic acid sequences. According to the present invention, there is provided a method for enhancing yield-related traits in plants, comprising introducing and expressing in a plant a portion of any one of the nucleic acid sequences given in Table A2 of the Examples section, or a portion of a nucleic acid encoding an orthologue, paralogue or homologue of any of the amino acid sequences given in Table A2 of the Examples section.

[0367] A portion of a nucleic acid may be prepared, for example, by making one or more deletions to the nucleic acid. The portions may be used in isolated form or they may be fused to other coding (or non-coding) sequences in order to, for example, produce a protein that combines several activities. When fused to other coding sequences, the resultant polypeptide produced upon translation may be bigger than that predicted for the protein portion.

[0368] Portions useful in the methods, constructs, plants, harvestable parts and products of the invention, encode a PMP22 polypeptide as defined herein, and have substantially the same biological activity as the amino acid sequences given in Table A2 of the Examples section. Preferably, the portion is a portion of any one of the nucleic acids given in Table A2 of the Examples section, or is a portion of a nucleic acid encoding an orthologue or paralogue of any one of the amino acid sequences given in Table A2 of the Examples section. Preferably the portion is at least 500, 550, 600, 650, 700, 750, 800, 850, 900, 950, 1000, 1050, 1100, 1150, 1200, 1250 or 1302 consecutive nucleotides in length, the consecutive nucleotides being of any one of the nucleic acid sequences given in Table A2 of the Examples section, or of a nucleic acid encoding an orthologue or paralogue of any one of the amino acid sequences given in Table A2 of the Examples section. Most preferably the portion is a portion of the nucleic acid of SEQ ID NO: 50. Preferably, the portion encodes a fragment of an amino acid sequence which, when used in the construction of a phylogenetic tree, such as the one depicted in FIG. 8, clusters with the group of PMP22 polypeptides comprising the amino acid sequence represented by SEQ ID NO: 51 (cluster A), rather than with any other group, and/or comprises motifs 1-2 to 9-2, and/or has at least 70% sequence identity to SEQ ID NO: 51.

[0369] Another nucleic acid variant useful in the methods of the invention is a nucleic acid capable of hybridising, under reduced stringency conditions, preferably under stringent conditions, with a nucleic acid encoding a PMP22 polypeptide as defined herein, or with a portion as defined herein.

[0370] According to the present invention, there is provided a method for enhancing yield-related traits in plants, comprising introducing and expressing in a plant a nucleic acid capable of hybridizing to any one of the nucleic acids given in Table A2 of the Examples section, or comprising introducing and expressing in a plant a nucleic acid capable of hybridising to a nucleic acid encoding an orthologue, paralogue or homologue of any of the nucleic acid sequences given in Table A2 of the Examples section.

[0371] Hybridising sequences useful in the methods, constructs, plants, harvestable parts and products of the invention encode a PMP22 polypeptide as defined herein, having substantially the same biological activity as the amino acid sequences given in Table A2 of the Examples section. Preferably, the hybridising sequence is capable of hybridising to the complement of any one of the nucleic acids given in Table A2 of the Examples section, or to a portion of any of these sequences, a portion being as defined above, or the hybridising sequence is capable of hybridising to the complement of a nucleic acid encoding an orthologue or paralogue of any one of the amino acid sequences given in Table A2 of the Examples section. Most preferably, the hybridising sequence is capable of hybridising to the complement of a nucleic acid as represented by SEQ ID NO: 50 or to a portion thereof.

[0372] Preferably, the hybridising sequence encodes a polypeptide with an amino acid sequence which, when full-length and used in the construction of a phylogenetic tree, such as the one depicted in FIG. 8, clusters with the group of PMP22 comprising the amino acid sequence represented by SEQ ID NO: 51 (cluster A) rather than with any other group, and/or comprises a PF04117 or IPR007248 domain, and/or comprises at least one motif from motifs 1-2 to 9-2 as specified elsewhere herein, and/or has at least 70% sequence identity to SEQ ID NO: 51.

[0373] In one embodiment the hybridising sequence is capable of hybridising to the complement of a nucleic acid as represented by SEQ ID NO: 50 or to a portion thereof under conditions of medium or high stringency, preferably high stringency as defined above. In another embodiment the hybridising sequence is capable of hybridising to the complement of a nucleic acid as represented by SEQ ID NO: 50 under stringent conditions.

[0374] Another nucleic acid variant useful in the methods, constructs, plants, harvestable parts and products of the invention is a splice variant encoding a PMP22 polypeptide as defined hereinabove, a splice variant being as defined herein.

[0375] According to the present invention, there is provided a method for enhancing yield-related traits in plants, comprising introducing and expressing in a plant a splice variant of any one of the nucleic acid sequences given in Table A2 of the Examples section, or a splice variant of a nucleic acid encoding an orthologue, paralogue or homologue of any of the amino acid sequences given in Table A2 of the Examples section.

[0376] Preferred splice variants are splice variants of a nucleic acid represented by SEQ ID NO: 50, or a splice variant of a nucleic acid encoding an orthologue or paralogue of SEQ ID NO: 51. Preferably, the amino acid sequence encoded by the splice variant, when used in the construction of a phylogenetic tree, such as the one depicted in FIG. 8, clusters with the group of PMP22 comprising the amino acid sequence represented by SEQ ID NO: 51 (cluster A) rather than with any other group, and/or comprises a PF04117 or IPR007248 domain, and/or comprises at least one motif from motifs 1-2 to 9-2 as specified elsewhere herein, and/or has at least 70% sequence identity to SEQ ID NO: 51.

[0377] Another nucleic acid variant useful in performing the methods of the invention is an allelic variant of a nucleic acid encoding a PMP22 polypeptide as defined hereinabove, an allelic variant being as defined herein.

[0378] According to the present invention, there is provided a method for enhancing yield-related traits in plants, comprising introducing and expressing in a plant an allelic variant of any one of the nucleic acids given in Table A2 of the Examples section, or comprising introducing and expressing in a plant an allelic variant of a nucleic acid encoding an orthologue, paralogue or homologue of any of the amino acid sequences given in Table A2 of the Examples section.

[0379] The polypeptides encoded by allelic variants useful in the methods of the present invention have substantially the same biological activity as the PMP22 polypeptide of SEQ ID NO: 51 and any of the amino acids depicted in Table A2 of the Examples section. Allelic variants exist in nature, and encompassed within the methods of the present invention is the use of these natural alleles. Preferably, the allelic variant is an allelic variant of SEQ ID NO: 50 or an allelic variant of a nucleic acid encoding an orthologue or paralogue of SEQ ID NO: 51. Preferably, the amino acid sequence encoded by the allelic variant, when used in the construction of a phylogenetic tree, such as the one depicted in FIG. 8, clusters with the group of PMP22 comprising the amino acid sequence represented by SEQ ID NO: 51 (cluster A) rather than with any other group, and/or comprises a PF04117 or IPR007248 domain, and/or comprises at least one motif from motifs 1-2 to 9-2 as specified elsewhere herein, and/or has at least 70% sequence identity to SEQ ID NO: 51.

[0380] Gene shuffling or directed evolution may also be used to generate variants of nucleic acids encoding PMP22 polypeptides as defined above; the term “gene shuffling” being as defined herein.

[0381] According to the present invention, there is provided a method for enhancing yield-related traits in plants, comprising introducing and expressing in a plant a variant of any one of the nucleic acid sequences given in Table A2 of the Examples section, or comprising introducing and expressing in a plant a variant of a nucleic acid encoding an orthologue, paralogue or homologue of any of the amino acid sequences given in Table A2 of the Examples section, which variant nucleic acid is obtained by gene shuffling.

[0382] Preferably, the amino acid sequence encoded by the variant nucleic acid obtained by gene shuffling, when used in the construction of a phylogenetic tree such as the one depicted in Figure 8, clusters with the group of PMP22 comprising the amino acid sequence represented by SEQ ID NO: 51 (cluster A) rather than with any other group, and/or comprises a PF04117 or IPR007248 domain, and/or comprises at least one motif from motifs 1-2 to 9-2 as specified elsewhere herein, and/or has at least 70% sequence identity to SEQ ID NO: 51.

[0383] Furthermore, nucleic acid variants may also be obtained by site-directed mutagenesis. Several methods are available to achieve site-directed mutagenesis, the most common being PCR based methods (Current Protocols in Molecular Biology. Wiley Eds.).

[0384] Nucleic acids encoding PMP22 polypeptides may be derived from any natural or artificial source. The nucleic acid may be modified from its native form in composition and/or genomic environment through deliberate human manipulation. Preferably the PMP22 polypeptide-encoding nucleic acid is from a plant, further preferably from a dicotyledonous plant, more preferably from the family Solanaceae, even further preferably from the genus Solanum, and most preferably the nucleic acid is from S. lycopersicum (which is the same of Lycopersicum esculentum).

[0385] In another embodiment the present invention extends to recombinant chromosomal DNA comprising a nucleic acid sequence useful in the methods, constructs, plants, harvestable parts and products of the invention, wherein said nucleic acid is present in the chromosomal DNA as a result of recombinant methods, i.e. said nucleic acid is not in the chromosomal DNA in its native surrounding. Said recombinant chromosomal DNA may be a chromosome of native origin, with said nucleic acid inserted by recombinant means, or it may be a mini-chromosome or a non-native chromosomal structure, e.g. or an artificial chromosome. The nature of the chromosomal DNA may vary, as long it allows for stable passing on to successive generations of the recombinant nucleic acid useful in the methods, constructs, plants, harvestable parts and products of the invention, and allows for expression of said nucleic acid in a living plant cell resulting in increased yield or increased yield related traits of the plant cell or a plant comprising the plant cell.

[0386] In a further embodiment the recombinant chromosomal DNA of the invention is comprised in a plant cell. DNA comprised within a cell, particularly a cell with cell walls like a plant cell, is better protected from degradation than a bare nucleic acid sequence. The same holds true for a DNA construct comprised in a host cell, for example a plant cell.

[0387] Performance of the methods of the invention gives plants having enhanced yield-related traits. In particular performance of the methods of the invention gives plants having increased yield, especially increased seed yield relative to control plants. The terms “yield” and “seed yield” are described in more detail in the “definitions” section herein.

[0388] Reference herein to enhanced yield-related traits is taken to mean an increase early vigour and/or in biomass (weight) of one or more parts of a plant, which may include (i) aboveground parts and preferably aboveground harvestable parts and/or (ii) parts below ground and preferably harvestable below ground. Preferably, such harvestable parts are seeds, leafs, roots and shoots. In particular, such harvestable parts are roots such as taproots, stems, seeds, and performance of the methods of the invention results in plants having increased seed yield relative to the seed yield of control plants, and/or increased stem biomass relative to the stem biomass of control plants, and/or increased root biomass relative to the root biomass and/or increased beet biomass relative to the beet biomass and/or increased tuber biomass relative to the tuber biomass of control plants. Moreover, it is particularly contemplated that the sugar content (in particular the sucrose content) in the stem (in particular of sugar cane plants) and/or in the belowground parts, in particular in roots including taproots, tubers and/or beets (in particular in sugar beets) is increased relative to the sugar content (in particular the sucrose content) in corresponding part(s) of the control plant.

[0389] The present invention provides a method for increasing yield-related traits, especially biomass yield or seed yield of plants, relative to control plants, which method comprises modulating expression in a plant of a nucleic acid encoding a PMP22 polypeptide as defined herein.

[0390] According to a preferred feature of the present invention, performance of the methods of the invention gives plants having an increased growth rate relative to control plants. Therefore, according to the present invention, there is provided a method for increasing the growth rate of plants, which method comprises modulating expression in a plant of a nucleic acid encoding a PMP22 polypeptide as defined herein.

[0391] Performance of the methods of the invention gives plants grown under non-stress conditions or under mild drought conditions increased yield relative to control plants grown under comparable conditions. Therefore, according to the present invention, there is provided a method for increasing yield in plants grown under non-stress conditions or under mild drought conditions, which method comprises modulating expression in a plant of a nucleic acid encoding a PMP22 polypeptide.

[0392] Performance of the methods of the invention gives plants grown under conditions of drought, increased yield relative to control plants grown under comparable conditions. Therefore, according to the present invention, there is provided a method for increasing yield in plants grown under conditions of drought which method comprises modulating expression in a plant of a nucleic acid encoding a PMP22 polypeptide.

[0393] Performance of the methods of the invention gives plants grown under conditions of nutrient deficiency, particularly under conditions of nitrogen deficiency, increased yield relative to control plants grown under comparable conditions. Therefore, according to the present invention, there is provided a method for increasing yield in plants grown under conditions of nutrient deficiency, which method comprises modulating expression in a plant of a nucleic acid encoding a PMP22 polypeptide.

[0394] Performance of the methods of the invention gives plants grown under conditions of salt stress, increased yield relative to control plants grown under comparable conditions. Therefore, according to the present invention, there is provided a method for increasing yield in plants grown under conditions of salt stress, which method comprises modulating expression in a plant of a nucleic acid encoding a PMP22 polypeptide.

[0395] The invention also provides genetic constructs and vectors to facilitate introduction and/or expression in plants of nucleic acids encoding PMP22 polypeptides. The gene constructs may be inserted into vectors, which may be commercially available, suitable for transforming into plants and suitable for expression of the gene of interest in the transformed cells. The invention also provides use of a gene construct as defined herein in the methods of the invention.

[0396] More specifically, the present invention provides a construct comprising:

(a) a nucleic acid encoding a PMP22 polypeptide as defined above;
(b) one or more control sequences capable of driving expression of the nucleic acid sequence of (a); and optionally
(c) a transcription termination sequence.

[0397] Preferably, the nucleic acid encoding a PMP22 polypeptide is as defined above. The term “control sequence” and “termination sequence” are as defined herein.

[0398] The invention furthermore provides plants transformed with a construct as described above. In particular, the invention provides plants transformed with a construct as described above, which plants have increased yield-related traits as described herein.

[0399] Plants are transformed with a vector comprising any of the nucleic acids described above. The skilled artisan is well aware of the genetic elements that must be present on the vector in order to successfully transform, select and propagate host cells containing the sequence of interest.

[0400] The sequence of interest is operably linked to one or more control sequences (at least to a promoter) in the vectors of the invention.

[0401] In one embodiment the plants of the invention are transformed with an expression cassette comprising any of the nucleic acids described above. The skilled artisan is well aware of the genetic elements that must be present on the expression cassette in order to successfully transform, select and propagate host cells containing the sequence of interest. In the expression cassettes of the invention the sequence of interest is operably linked to one or more control sequences (at least to a promoter). The promoter in such an expression cassette may be a non-native promoter to the nucleic acid described above, i.e. a promoter not regulating the expression of said nucleic acid in its native surrounding.

[0402] In one embodiment the terms expression cassettes of the invention, genetic construct and constructs of the invention are used exchangeably.

[0403] In a further embodiment the expression cassettes of the invention confer increased yield or yield related traits(s) to a living plant cell when they have been introduced into said plant cell and resuit in expression of the nucleic acid as defined above, comprised in the expression cassette(s).

[0404] The promoter in such expression cassettes may be a non-native promoter to the nucleic acid described above, i.e. a promoter not regulating the expression of said nucleic acid in its native surrounding.

[0405] The expression cassettes of the invention may be comprised in a host cell, plant cell, seed, agricultural product or plant.

[0406] Advantageously, any type of promoter, whether natural or synthetic, may be used to drive expression of the nucleic acid sequence, but preferably the promoter is of plant origin. A constitutive promoter is particularly useful in the methods. Preferably the constitutive promoter is a ubiquitous constitutive promoter of medium strength. See the “Definitions” section herein for definitions of the various promoter types. Also useful in the methods, constructs, plants, harvestable parts and products of the invention is a tissue specific promoter such as a seed or root-specific promoter.

[0407] It should be clear that the applicability of the present invention is not restricted to the PMP22 polypeptide-encoding nucleic acid represented by SEQ ID NO: 50, nor is the applicability of the invention restricted to expression of a PMP22 polypeptide-encoding nucleic acid when driven by a constitutive promoter.

[0408] The constitutive promoter is preferably a medium strength promoter. More preferably it is a plant derived promoter, e.g. a promoter of plant chromosomal origin, such as a GOS2 promoter or a promoter of substantially the same strength and having substantially the same expression pattern (a functionally equivalent promoter), more preferably the promoter is the promoter GOS2 promoter from rice. Further preferably the constitutive promoter is represented by a nucleic acid sequence substantially similar to SEQ ID NO: 135, most preferably the constitutive promoter is as represented by SEQ ID NO: 135. See the “Definitions” section herein for further examples of constitutive promoters.

[0409] In a preferred embodiment, the polynucleotide encoding the PMP22 polypeptide as used in the plants, constructs and methods of the present invention is linked to a promoter which allows for the expression, preferably the strongest expression in the aboveground parts of the plant as compared to the expression in other parts of the plant. This applies, in particular, if the plant is a monocot. As set forth elsewhere herein, preferred monocots are maize, wheat, rice, or sugarcane. In another preferred embodiment of the present invention, the polynucleotide encoding the PMP22 polypeptide as used in the plants, constructs and methods of the present invention is preferably linked to a promoter which allows for the expression, preferably the strongest expression in the belowground parts of the plant as compared to the expression in other parts of the plant. This applies, in particular, if the plant is a dicot. Preferred dicots are sugar beet and potato. For example, if the plant is a sugar beet, the promoter, preferably, allows for the strongest expression in the taproot as compared to the expression in other parts of the plant. In one embodiment the promoter used for expression in sugar beets is, preferably a root specific, more preferably a taproot or beet specific promoter.

[0410] Optionally, one or more terminator sequences may be used in the construct introduced into a plant. Preferably, the construct comprises an expression cassette comprising a GOS2 promoter, substantially similar to SEQ ID NO: 135, operably linked to the nucleic acid encoding the PMP22 polypeptide. More preferably, the construct comprises a zein terminator (t-zein) linked to the 3′ end of the PMP22 coding sequence. Most preferably, the expression cassette comprises a sequence having in increasing order of preference at least 95%, at least 96%, at least 97%, at least 98%, at least 99% identity to the sequence represented by pPRO::PMP22::t-zein sequence as comprised by the expression vector having a sequence as shown in SEQ ID NO:136. Furthermore, one or more sequences encoding selectable markers may be present on the construct introduced into a plant.

[0411] According to a preferred feature of the invention, the modulated expression is increased expression (and, thus over-expression). Methods for increasing expression of nucleic acids or genes, or gene products, are well documented in the art and examples are provided in the definitions section.

[0412] As mentioned above, a preferred method for modulating expression of a nucleic acid encoding a PMP22 polypeptide is by introducing and expressing in a plant a nucleic acid encoding a PMP22 polypeptide; however the effects of performing the method, i.e. enhancing yield-related traits may also be achieved using other well known techniques, including but not limited to T-DNA activation tagging, TILLING, homologous recombination. A description of these techniques is provided in the definitions section.

[0413] The invention also provides a method for the production of transgenic plants having enhanced yield-related traits relative to control plants, comprising introduction and expression in a plant of any nucleic acid encoding a PMP22 polypeptide as defined hereinabove.

[0414] More specifically, the present invention provides a method for the production of transgenic plants having enhanced yield-related traits, particularly increased biomass or seed yield, which method comprises:

(i) introducing and expressing in a plant or plant cell a PMP22 polypeptide-encoding nucleic acid or a genetic construct comprising a PMP22 polypeptide-encoding nucleic acid; and
(ii) cultivating the plant cell under conditions promoting plant growth and development.

[0415] Cultivating the plant cell under conditions promoting plant growth and development, may or may not include regeneration and or growth to maturity.

[0416] The nucleic acid of (i) may be any of the nucleic acids capable of encoding a PMP22 polypeptide as defined herein.

[0417] The nucleic acid may be introduced directly into a plant cell or into the plant itself (including introduction into a tissue, organ or any other part of a plant). According to a preferred feature of the present invention, the nucleic acid is preferably introduced into a plant by transformation. The term “transformation” is described in more detail in the “definitions” section herein.

[0418] In one embodiment the present invention clearly extends to any plant cell or plant produced by any of the methods described herein, and to all plant parts and propagules thereof. The present invention encompasses plants or parts thereof (including seeds) obtainable by the methods according to the present invention. The plants or parts thereof comprise a nucleic acid transgene encoding a PMP22 polypeptide as defined above. The present invention extends further to encompass the progeny of a primary transformed or transfected cell, tissue, organ or whole plant that has been produced by any of the aforementioned methods, the only requirement being that progeny exhibit the same genotypic and/or phenotypic characteristic(s) as those produced by the parent in the methods according to the invention.

[0419] The present invention also extends in another embodiment to transgenic plant cells and seed comprising the nucleic acid molecule of the invention in a plant expression cassette or a plant expression construct.

[0420] In a further embodiment the seed of the invention recombinantly comprise the expression cassettes of the invention, the (expression) constructs of the invention, the nucleic acids described above and/or the proteins encoded by the nucleic acids as described above.

[0421] A further embodiment of the present invention extends to plant cells comprising the nucleic acid as described above in a recombinant plant expression cassette.

[0422] In yet another embodiment the plant cells of the invention are non-propagative cells, e.g. the cells can not be used to regenerate a whole plant from this cell as a whole using standard cell culture techniques, this meaning cell culture methods but excluding in-vitro nuclear, organelle or chromosome transfer methods. While plants cells generally have the characteristic of totipotency, some plant cells can not be used to regenerate or propagate intact plants from said cells. In one embodiment of the invention the plant cells of the invention are such cells. In another embodiment the plant cells of the invention are plant cells that do not sustain themselves in an autotrophic way. One example are plant cells that do not sustain themselves through photosynthesis by synthesizing carbohydrate and protein from such inorganic substances as water, carbon dioxide and mineral salt.

[0423] In another embodiment the plant cells of the invention are plant cells that do not sustain themselves through photosynthesis by synthesizing carbohydrate and protein from such inorganic substances as water, carbon dioxide and mineral salt, i.e. they may be deemed non-plant variety. In a further embodiment the plant cells of the invention are non-plant variety and non-propagative.

[0424] The invention also includes host cells containing an isolated nucleic acid encoding a PMP22 polypeptide as defined hereinabove. Host cells of the invention may be any cell selected from the group consisting of bacterial cells, such as E. coli or Agrobacterium species cells, yeast cells, fungal, algal or cyanobacterial cells or plant cells. In one embodiment host cells according to the invention are plant cells, yeasts, bacteria or fungi. Host plants for the nucleic acids or the vector used in the method according to the invention, the expression cassette or construct or vector are, in principle, advantageously all plants, which are capable of synthesizing the polypeptides used in the inventive method.

[0425] In one embodiment the plant cells of the invention overexpress the nucleic acid molecule of the invention.

[0426] The invention also includes methods for the production of a product comprising a) growing the plants of the invention and b) producing said product from or by the plants of the invention or parts, including seeds, of these plants. In a further embodiment the methods comprises steps a) growing the plants of the invention, b) removing the harvestable parts as defined above from the plants and c) producing said product from or by the harvestable parts of the invention.

[0427] Examples of such methods would be growing corn plants of the invention, harvesting the corn cobs and remove the kernels. These may be used as feedstuff or processed to starch and oil as agricultural products.

[0428] The product may be produced at the site where the plant has been grown, or the plants or parts thereof may be removed from the site where the plants have been grown to produce the product. Typically, the plant is grown, the desired harvestable parts are removed from the plant, if feasible in repeated cycles, and the product made from the harvestable parts of the plant. The step of growing the plant may be performed only once each time the methods of the invention is performed, while allowing repeated times the steps of product production e.g. by repeated removal of harvestable parts of the plants of the invention and if necessary further processing of these parts to arrive at the product. It is also possible that the step of growing the plants of the invention is repeated and plants or harvestable parts are stored until the production of the product is then performed once for the accumulated plants or plant parts. Also, the steps of growing the plants and producing the product may be performed with an overlap in time, even simultaneously to a large extend, or sequentially. Generally the plants are grown for some time before the product is produced.

[0429] Advantageously the methods of the invention are more efficient than the known methods, because the plants of the invention have increased yield and/or stress tolerance to an environmental stress compared to a control plant used in comparable methods.

[0430] In one embodiment the products produced by said methods of the invention are plant products such as, but not limited to, a foodstuff, feedstuff, a food supplement, feed supplement, fiber, cosmetic or pharmaceutical. Foodstuffs are regarded as compositions used for nutrition or for supplementing nutrition. Animal feedstuffs and animal feed supplements, in particular, are regarded as foodstuffs.

[0431] In another embodiment the inventive methods for the production are used to make agricultural products such as, but not limited to, plant extracts, proteins, amino acids, carbohydrates, fats, oils, polymers, vitamins, and the like.

[0432] It is possible that a plant product consists of one ore more agricultural products to a large extent.

[0433] In yet another embodiment the polynucleotide sequences or the polypeptide sequences of the invention are comprised in an agricultural product. in a further embodiment the nucleic acid sequences and protein sequences of the invention may be used as product markers, for example for an agricultural product produced by the methods of the invention. Such a marker can be used to identify a product to have been produced by an advantageous process resulting not only in a greater efficiency of the process but also improved quality of the product due to increased quality of the plant material and harvestable parts used in the process. Such markers can be detected by a variety of methods known in the art, for example but not limited to PCR based methods for nucleic acid detection or antibody based methods for protein detection.

[0434] The methods of the invention are advantageously applicable to any plant, in particular to any plant as defined herein. Plants that are particularly useful in the methods, constructs, plants, harvestable parts and products of the invention include all plants which belong to the superfamily Viridiplantae, in particular monocotyledonous and dicotyledonous plants including fodder or forage legumes, ornamental plants, food crops, trees or shrubs.

[0435] According to an embodiment of the present invention, the plant is a crop plant. Examples of crop plants include but are not limited to chicory, carrot, cassava, trefoil, soybean, beet, sugar beet, sunflower, canola, alfalfa, rapeseed, linseed, cotton, tomato, potato and tobacco.

[0436] According to another embodiment of the present invention, the plant is a monocotyledonous plant. Examples of monocotyledonous plants include sugarcane.

[0437] According to another embodiment of the present invention, the plant is a cereal. Examples of cereals include rice, maize, wheat, barley, millet, rye, triticale, sorghum, emmer, spelt, einkorn, teff, milo and oats.

[0438] In one embodiment the plants used of the invention or in the methods of the invention are selected from the group consisting of maize, wheat, rice, soybean, cotton, oilseed rape including canola, sugarcane, sugar beet and alfalfa.

[0439] In another embodiment of the present invention the plants of the invention and the plants used in the methods of the invention are sugarbeet plants with increased biomass and/or increased sugar content of the beets. In another embodiment of the present invention the plants of the invention and the plants used in the methods of the invention are sugarcane plants with increased biomass and/or increased sugar content.

[0440] The invention also extends to harvestable parts of a plant such as, but not limited to seeds, leaves, fruits, flowers, stems, roots, rhizomes, tubers and bulbs, which harvestable parts comprise a recombinant nucleic acid encoding a PMP22 polypeptide. The invention furthermore relates to products derived or produced, preferably directly derived or produced, from a harvestable part of such a plant, such as dry pellets or powders, oil, fat and fatty acids, starch or proteins. In one embodiment the product comprises a recombinant nucleic acid encoding a PMP22 polypeptide and/or a recombinant PMP22 polypeptide for example as an indicator of the particular quality of the product.

[0441] The present invention also encompasses use of nucleic acids encoding PMP22 polypeptides as described herein and use of these PMP22 polypeptides in enhancing any of the aforementioned yield-related traits in plants. For example, nucleic acids encoding PMP22 polypeptide described herein, or the PMP22 polypeptides themselves, may find use in breeding programmes in which a DNA marker is identified which may be genetically linked to a PMP22 polypeptide-encoding gene. The nucleic acids/genes, or the PMP22 polypeptides themselves may be used to define a molecular marker. This DNA or protein marker may then be used in breeding programmes to select plants having enhanced yield-related traits as defined hereinabove in the methods of the invention. Furthermore, allelic variants of a PMP22 polypeptide-encoding nucleic acid/gene may find use in marker-assisted breeding programmes. Nucleic acids encoding PMP22 polypeptides may also be used as probes for genetically and physically mapping the genes that they are a part of, and as markers for traits linked to those genes. Such information may be useful in plant breeding in order to develop lines with desired phenotypes.

[0442] In one embodiment any comparison to determine sequence identity percentages is performed
[0443] in the case of a comparison of nucleic acids over the entire coding region of SEQ ID NO: 50, or
[0444] in the case of a comparison of polypeptide sequences over the entire length of SEQ ID NO: 51.

[0445] For example, a sequence identity of 50% sequence identity in this embodiment means that over the entire coding region of SEQ ID NO: 50, 50 percent of all bases are identical between the sequence of SEQ ID NO: 50 and the related sequence. Similarly, in this embodiment a polypeptide sequence is 50% identical to the polypeptide sequence of SEQ ID NO: 51, when 50 percent of the amino acids residues of the sequence as represented in SEQ ID NO: 51, are found in the polypeptide tested when comparing from the starting methionine to the end of the sequence of SEQ ID NO: 51.

[0446] In one embodiment the nucleic acid sequences employed in the methods, constructs, plants, harvestable parts and products of the invention are sequences encoding PMP22.

### C-3. RTF (REM-Like Transcription Factor) Polypeptide

[0447] Surprisingly, it has now been found that modulating expression in a plant of a nucleic acid encoding a RTF polypeptide gives plants having enhanced yield-related traits relative to control plants.

[0448] According to a first embodiment, the present invention provides a method for enhancing yield-related traits in plants relative to control plants, comprising modulating expression in a plant of a nucleic acid encoding a RTF polypeptide and optionally selecting for plants having enhanced yield-related traits. According to another embodiment, the present invention provides a method for producing plants having enhancing yield-related traits relative to control plants, wherein said method comprises the steps of modulating expression in said plant of a nucleic acid encoding a RTF polypeptide as described herein and optionally selecting for plants having enhanced yield-related traits.

[0449] A preferred method for modulating (preferably, increasing) expression of a nucleic acid encoding a RTF polypeptide is by introducing and expressing in a plant a nucleic acid encoding a RTF polypeptide.

[0450] Any reference hereinafter in section C-3 to a “protein useful in the methods of the invention” is taken to mean a RTF polypeptide as defined herein. Any reference hereinafter to a “nucleic acid useful in the methods of the invention” is taken to mean a nucleic acid capable of encoding such a RTF polypeptide. In one embodiment any reference to a protein or nucleic acid “useful in the methods of the invention” is to be understood to mean proteins or nucleic acids “useful in the methods, constructs, plants, harvestable parts and products of the invention”. The nucleic acid to be introduced into a plant (and therefore useful in performing the methods of the invention) is any nucleic acid encoding the type of protein which will now be described, hereafter also named “RTF nucleic acid” or “RTF gene”. “RTF” is the abbreviation for REM (Reproductive meristem)-like transcription factor.

[0451] A “RTF polypeptide” as used herein, preferably, refers to a polypeptide comprising at least two B3 domains. Preferably, the RTF polypeptide also comprises an IPR015300 domain (DNA-binding pseudobarrel domain).

[0452] Preferably, the RTF polypeptide applied in the context of the present invention is encoded by a nucleic acid selected from
[0453] (i) a nucleic acid represented by any one of SEQ ID NO: 139, 141, 143, 145, 147, 149, 151, 153, 155, 157, 159, 161, or 163;
[0454] (ii) the complement of a nucleic acid represented by any one of SEQ ID NO: 139, 141, 143, 145, 147, 149, 151, 153, 155, 157, 159, 161, or 163;
[0455] (iii) a nucleic acid encoding the polypeptide as represented by any one of SEQ ID NO: 140, 142, 144, 146, 148, 150, 152, 154, 156, 158, 160, 162, or 164, preferably as a result of the degeneracy of the genetic code, said isolated nucleic acid can be deduced from a polypeptide sequence as represented by any one of SEQ ID NO: 140, 142, 144, 146, 148, 150, 152, 154, 156, 158, 160, 162, or 164;
[0456] (iv) a nucleic acid having, in increasing order of preference at least 30%, 31%, 32%, 33%, 34%, 35%, 36%, 37%, 38%, 39%, 40%, 41%, 42%, 43%, 44%, 45%, 46%, 47%, 48%, 49%, 50%, 51%, 52%, 53%, 54%, 55%, 56%, 57%, 58%, 59%, 60%, 61%, 62%, 63%, 64%, 65%, 66%, 67%, 68%, 69%, 70%, 71%, 72%, 73%, 74%, 75%, 76%, 77%, 78%, 79%, 80%, 81%, 82%, 83%, 84%, 85%, 86%, 87%, 88%, 89%, 90%, 91%, 92%, 93%, 94%, 95%, 96%, 97%, 98%, or 99% sequence identity with any of the nucleic acid sequences of SEQ ID NO SEQ ID NO: 139, 141, 143, 145, 147, 149, 151, 153, 155, 157, 159, 161, or 163,
[0457] (v) a nucleic acid which hybridizes with the nucleic acid molecule of (i) to (iv) under stringent hybridization conditions, and
[0458] (vi) a nucleic acid encoding a polypeptide having, in increasing order of preference, at least 50%, 51%, 52%, 53%, 54%, 55%, 56%, 57%, 58%, 59%, 60%, 61%, 62%, 63%, 64%, 65%, 66%, 67%, 68%, 69%, 70%, 71%, 72%, 73%, 74%, 75%, 76%, 77%, 78%, 79%, 80%, 81%, 82%, 83%, 84%, 85%, 86%, 87%, 88%, 89%, 90%, 91%, 92%, 93%, 94%, 95%, 96%, 97%, 98%, or 99 sequence identity to the amino acid sequence represented by any one of SEQ ID NO: 140, 142, 144, 146, 148, 150, 152, 154, 156, 158, 160, 162, or 164.

[0459] Preferably, the RTF polypeptide encoded by the nucleic acid as set forth above confers—when expressed in a plant—enhanced yield-related traits relative to control plants, in particular, increased biomass (in particular increased aboveground and increased root biomass), and/or improved early vigor

[0460] Preferably, the B3 domains comprised by the “RTF polypeptide” are domains having the PFAM accession number pfam02362. More preferably, the B3 domains comprised by the “RTF polypeptide” are domains having the Interpro accession number IPR003340.

[0461] The Interpro domain IPR003340, preferably, corresponds to the IPR003340 domain of the InterPro database, Release 31.0 (9 Feb. 2011). The Interpro domain IPR015300 is a DNA-binding pseudobarrel domain. Preferably, the domain, preferably, corresponds to the IPR015300 domain of the InterPro database, Release 35.0, 15 Dec. 2011.

[0462] The Pfam domain pfam02362, preferably, corresponds to PFAM domain with the accession number pfam02362 in the Pfam database, Release 24.0 (Pfam 24.0, October 2009), see also The Pfam protein families database: R. D. Finn, J. Mistry, J. Tate, P. Coggill, A. Heger, J. E. Pollington, O. L. Gavin, P. Gunesekaran, G. Ceric, K. Forslund, L. Holm, E. L. Sonnhammer, S. R. Eddy, A. Bateman Nucleic Acids Research (2010) Database Issue 38:D211-222.

[0463] In a preferred embodiment of the present invention, the RTF polypeptide comprises three B3 domains, in particular three domains having the PFAM accession number pfam02362 or having the Interpro accession number IPR003340. In an even more preferred embodiment, the RTF polypeptide comprises four B3 domains, in particular four domains having the PFAM accession number pfam02362 or having the Interpro accession number IPR003340. Is it also preferred that the RTF polypeptide comprises five, six, seven or eight B3 domains. Preferably, the RTF polypeptide further comprises an IPR015300 domain (DNA-binding pseudobarrel domain).

[0464] The B3 domains comprised by the RTF polypeptide are, preferably, separated by 10 to 150 amino acids, more preferably by 15 to 120 amino acids, even more preferably, by 20 to 200 amino acids, even more preferably, by 25 to 95 amino acids, and most preferably by 29 to 92 amino acids.

[0465] As set forth above, the RTF polypeptide comprises preferably a four B3 domains: a first, second, third and fourth B3 domain.

[0466] Preferably, the first B3 domain comprises a sequence having, in increasing order of preference, at least 70%, 71%, 72%, 73%, 74%, 75%, 76%, 77%, 78%, 79%, 80%, 81%, 82%, 83%, 84%, 85%, 86%, 87%, 88%, 89%, 90%, 91%, 92%, 93%, 94%, 95%, 96%, 97%, 98%, 99%, or 100% sequence identity to a conserved domain from amino acid 13 to 105 in SEQ ID NO: 140. Preferably, the second B3 domain comprises a sequence having, in increasing order of preference, at least 70%, 71%, 72%, 73%, 74%, 75%, 76%, 77%, 78%, 79%, 80%, 81%, 82%, 83%, 84%, 85%, 86%, 87%, 88%, 89%, 90%, 91%, 92%, 93%, 94%, 95%, 96%, 97%, 98%, 99%, or 100% sequence identity to a conserved domain from amino acid 150 to 247 in SEQ ID NO: 140. Preferably, the third B3 domain comprises a sequence having, in increasing order of preference, at least 70%, 71%, 72%, 73%, 74%, 75%, 76%, 77%, 78%, 79%, 80%, 81%, 82%, 83%, 84%, 85%, 86%, 87%, 88%, 89%, 90%, 91%, 92%, 93%, 94%, 95%, 96%, 97%, 98%, 99%, or 100% sequence identity to a conserved domain from amino acid 276 to 372 in SEQ ID NO: 140. Preferably, the fourth B3 domain comprises a sequence having, in increasing order of preference, at least 70%, 71%, 72%, 73%, 74%, 75%, 76%, 77%, 78%, 79%, 80%, 81%, 82%, 83%, 84%, 85%, 86%, 87%, 88%, 89%, 90%, 91%, 92%, 93%, 94%, 95%, 96%, 97%, 98%, 99%, or 100% sequence identity to a conserved domain from amino acid 464 to 555 in SEQ ID NO:140).

[0467] Preferably, the order within the RTF polypeptide is as follows (from the N- to the C-terminus) is as follows: first B3 domain, second B3 domain, a third B3 domain and fourth B3 domain. Preferably the B3 domains are separated by 10 to 150 amino acids, and, more preferably, by 25 to 95 amino acids. Is particularly preferred that the first and second B3 domains are separated by 40 to 60 amino acids, that the second and third second B3 domains are separated by 20 to 50 amino acids, and that the third and fourth second B3 domains are separated by 80 to 120 amino acids.

[0468] Preferably, the degree of sequence identity is determined over the entire length of the aforementioned domains.

[0469] The B3 domains comprised by the RTF polypeptide, preferably, have a structure as described by Swaminathan et al. ((2008) The plant B3 superfamily. Trends Plant Sci. 2008 December; 13(12):647-55, see FIG. 4). Accordingly, the B3 domain, preferably, comprises seven beta-strands which form an open beta barrel and two alpha helices.

[0470] Preferably, the RTF polypeptide comprises at least one Motif selected from

Motif 1-3 (SEQ ID NO: 165):
PVAFF,
and
Motif 2-3 (SEQ ID NO: 166):
HDLRVGDIVVF.

[0471] It is particularly preferred that the RTF polypeptide comprises both Motif 1-3 and Motif 2-3.

[0472] When comprised by the plant cell, the RTF polypeptide is, preferably, located in the nucleus of a plant cell.

[0473] The term “RTF” or “RTF polypeptide” as used herein also intends to include homologues as defined hereunder of “RTF polypeptide”.

[0474] Additionally or alternatively, the RTF polypeptide or homologue of thereof has in increasing order of preference at least 25%, 26%, 27%, 28%, 29%, 30%, 31%, 32%, 33%, 34%, 35%, 36%, 37%, 38%, 39%, 40%, 41%, 42%, 43%, 44%, 45%, 46%, 47%, 48%, 49%, 50%, 51%, 52%, 53%, 54%, 55%, 56%, 57%, 58%, 59%, 60%, 61%, 62%, 63%, 64%, 65%, 66%, 67%, 68%, 69%, 70%, 71%, 72%, 73%, 74%, 75%, 76%, 77%, 78%, 79%, 80%, 81%, 82%, 83%, 84%, 85%, 86%, 87%, 88%, 89%, 90%, 91%, 92%, 93%, 94%, 95%, 96%, 97%, 98%, or 99% overall sequence identity to the amino acid represented by SEQ ID NO: 140 provided that the homologous protein comprises at least two B3 domains, in particular three or four B3 domains as described above. Preferably, said RTF polypeptide or homologue of thereof comprised Motif 1-3 and/or Motif 2-3 (preferably Motif 1-3 and Motif 2-3). The overall sequence identity is determined using a global alignment algorithm, such as the Needleman Wunsch algorithm in the program GAP (GCG Wisconsin Package, Accelrys), preferably with default parameters and preferably with sequences of mature proteins (i.e. without taking into account secretion signals or transit peptides).

[0475] Preferably, the sequence identity is determined by comparison of the polypeptide sequences over the entire length of the sequence of SEQ ID NO: 140. Also, the sequence identity level of a nucleic acid sequence is, preferably, determined by comparison of the nucleic acid sequence over the entire length of the coding sequence of the sequence of SEQ ID NO: 139.

[0476] Compared to overall sequence identity, the sequence identity will generally be higher when only conserved domains or motifs are considered. Preferably the motifs in a RTF polypeptide have, in increasing order of preference, at least 70%, 71%, 72%, 73%, 74%, 75%, 76%, 77%, 78%, 79%, 80%, 81%, 82%, 83%, 84%, 85%, 86%, 87%, 88%, 89%, 90%, 91%, 92%, 93%, 94%, 95%, 96%, 97%, 98%, or 99% sequence identity to any one or more of the motifs represented by SEQ ID NO: 165, an/or SEQ ID NO: 166 (Motifs 1-3 or 2-3).

[0477] The terms “domain”, “signature” and “motif” are defined in the “definitions” section herein.

[0478] In a preferred embodiment the RTF polypeptide/nucleic acid employed in the methods, constructs, plants, harvestable parts and products of the invention does not comprise the following sequence:

SEQ ID NOs: 43550, 43565, 43576, 43568, 43548, 43575, 193877, 93871, 43560, 93863, 43562, 93879, 43570, 43558, 43578, 93869, 43556, 43572, and 93875 as disclosed in EP2090662A2,
SEQ ID NOs: 312 and 2527 as disclosed in WO02/16655;
SEQ ID NO: 72 as disclosed in EP 2154956A2, and
SEQ ID NOs: 931, 584, 838, 1764 as disclosed in WO2009014665;
SEQ ID NOs 10289 and 10291 as disclosed in US20060107345, and
SEQ ID NOs: 20362 and 20364 as disclosed in US20060150283.

[0479] In one embodiment, the sequence of the nucleic acid encoding said RTF polypeptide or the sequence of the RTF polypeptide is, preferably, not the sequence as shown in SEQ ID NO 237 as disclosed in WO2008/122980 and US20100154077, respectively, and the sequence as shown in SEQ ID NO: 931 as disclosed in WO2009/014665.

[0480] Preferably, the polypeptide sequence which when used in the construction of a phylogenetic tree, such as the one depicted in FIG. 13, clusters with the RTF polypeptide comprising the amino acid sequence represented by SEQ ID NO: 140 rather than with any other group.

[0481] Furthermore, the RTF polypeptide (at least its native form) preferably, binds to DNA, and, thus, has DNA binding activity. In particular, the RTF polypeptide shall bind to the major groove. Tools and techniques for assessing whether a polypeptide binds to DNA are well known in the art.

[0482] In addition, RTF polypeptides, when expressed in plant, in particular in monocots such as rice, maize, wheat or sugarcane, according to the methods of the present invention as outlined in the Examples section (see, e.g. Example XI-3), give plants having increased yield related traits, in particular increased biomass (in particular increased aboveground and increased root biomass), and improved early vigor. Preferably, said increased yield related traits obtained under non stress conditions.

[0483] The present invention is illustrated by transforming plants with the nucleic acid sequence represented by SEQ ID NO: 139, encoding the polypeptide sequence of SEQ ID NO: 140. However, performance of the invention is not restricted to these sequences; the methods of the invention may advantageously be performed using any RTF-encoding nucleic acid or RTF polypeptide as defined herein.

[0484] Examples of preferred nucleic acids encoding RTF polypeptides are given in Table A3 of the Examples section herein. Such nucleic acids are useful in performing the methods of the invention. The amino acid sequences given in Table A3 of the Examples section are example sequences of orthologues and paralogues of the RTF polypeptide represented by SEQ ID NO: 140, the terms “orthologues” and “paralogues” being as defined herein. Further orthologues and paralogues may readily be identified by performing a so-called reciprocal blast search as described in the definitions section; where the query sequence is SEQ ID NO: 139 or SEQ ID NO: 140, the second BLAST (back-BLAST) would be against Arabidopsis thaliana sequences.

[0485] In the context of the present invention, the nucleic acid encoding the RTF polypeptide is, preferably, selected from:
[0486] (i) a nucleic acid represented by SEQ ID NO: 139;
[0487] (ii) the complement of a nucleic acid represented by SEQ ID NO: 139;
[0488] (iii) a nucleic acid encoding a RTF polypeptide having in increasing order of preference at least 20%, 30%, 40%, 50%, 51%, 52%, 53%, 54%, 55%, 56%, 57%, 58%, 59%, 60%, 61%, 62%, 63%, 64%, 65%, 66%, 67%, 68%, 69%, 70%, 71%, 72%, 73%, 74%, 75%, 76%, 77%, 78%, 79%, 80%, 81%, 82%, 83%, 84%, 85%, 86%, 87%, 88%, 89%, 90%, 91%, 92%, 93%, 94%, 95%, 96%, 97%, 98%, or 99% sequence identity to the amino acid sequence represented by SEQ ID NO: 140.
[0489] (iv) a nucleic acid molecule which hybridizes with a nucleic acid molecule of (i) to (iii) under high stringency hybridization conditions and preferably confers enhanced yield-related traits relative to control plants.

[0490] Preferably, the polypeptide encoded by the said nucleic acid comprises at least 2 (in particular, 2, 3 or 4) B3 domains as described herein above. Preferably, said polypeptide also comprises Motif 1-3 and/or Motif 2-3 (preferably, both). Moreover, said polypeptide, preferably, confers enhanced yield-related traits relative to control plants, in particular, increased biomass (in particular increased aboveground and increased root biomass), and improved early vigor (when expressed in a plant).

[0491] Preferably, the RTF polypeptide is encoded by a nucleic acid molecule comprising a nucleic acid molecule selected from the group consisting of:
[0492] (i) a nucleic acid represented by any one of SEQ ID NO: 139, 141, 143, 145, 147, 149, 151, 153, 155, 157, 159, 161, or 163;
[0493] (ii) the complement of a nucleic acid represented by any one of SEQ ID NO: 139, 141, 143, 145, 147, 149, 151, 153, 155, 157, 159, 161, or 163;
[0494] (iii) a nucleic acid encoding the polypeptide as represented by any one of SEQ ID NO: 140, 142, 144, 146, 148, 150, 152, 154, 156, 158, 160, 162, or 164, preferably as a resuit of the degeneracy of the genetic code, said isolated nucleic acid can be deduced from a polypeptide sequence as represented by any one of SEQ ID NO: 140, 142, 144, 146, 148, 150, 152, 154, 156, 158, 160, 162, or 164 and further preferably confers enhanced yield-related traits relative to control plants;
[0495] (iv) a nucleic acid having, in increasing order of preference at least 30%, 31%, 32%, 33%, 34%, 35%, 36%, 37%, 38%, 39%, 40%, 41%, 42%, 43%, 44%, 45%, 46%, 47%, 48%, 49%, 50%, 51%, 52%, 53%, 54%, 55%, 56%, 57%, 58%, 59%, 60%, 61%, 62%, 63%, 64%, 65%, 66%, 67%, 68%, 69%, 70%, 71%, 72%, 73%, 74%, 75%, 76%, 77%, 78%, 79%, 80%, 81%, 82%, 83%, 84%, 85%, 86%, 87%, 88%, 89%, 90%, 91%, 92%, 93%, 94%, 95%, 96%, 97%, 98%, or 99% sequence identity with any of the nucleic acid sequences of SEQ ID NO SEQ ID NO: 139, 141, 143, 145, 147, 149, 151, 153, 155, 157, 159, 161, or 163, and further preferably conferring enhanced yield-related traits relative to control plants,
[0496] (v) a first nucleic acid molecule which hybridizes with a second nucleic acid molecule of (i) to (iv) under stringent hybridization conditions and preferably confers enhanced yield-related traits relative to control plants;
[0497] (vi) a nucleic acid encoding said polypeptide having, in increasing order of preference, at least 50%, 51%, 52%, 53%, 54%, 55%, 56%, 57%, 58%, 59%, 60%, 61%, 62%, 63%, 64%, 65%, 66%, 67%, 68%, 69%, 70%, 71%, 72%, 73%, 74%, 75%, 76%, 77%, 78%, 79%, 80%, 81%, 82%, 83%, 84%, 85%, 86%, 87%, 88%, 89%, 90%, 91%, 92%, 93%, 94%, 95%, 96%, 97%, 98%, or 99% sequence identity to the amino acid sequence represented by any one of SEQ ID NO: 140, 142, 144, 146, 148, 150, 152, 154, 156, 158, 160, 162, or 164 and preferably conferring enhanced yield-related traits relative to control plants; or
[0498] (vii) a nucleic acid comprising any combination(s) of features of (i) to (vi) above.

[0499] Most preferably, the RTF polypeptide is selected from:
[0500] (i) an amino acid sequence represented by SEQ ID NO: 140;
[0501] (ii) an amino acid sequence having, in increasing order of preference, at least 20%, 30%, 40%, 50%, 51%, 52%, 53%, 54%, 55%, 56%, 57%, 58%, 59%, 60%, 61%, 62%, 63%, 64%, 65%, 66%, 67%, 68%, 69%, 70%, 71%, 72%, 73%, 74%, 75%, 76%, 77%, 78%, 79%, 80%, 81%, 82%, 83%, 84%, 85%, 86%, 87%, 88%, 89%, 90%, 91%, 92%, 93%, 94%, 95%, 96%, 97%, 98%, 99% or 100% sequence identity to the amino acid sequence represented by SEQ ID NO: 140;
[0502] (iii) derivatives of any of the amino acid sequences given in (i) or (ii) above;
[0503] (iv) a polypeptide with the biological activity of the polypeptide as shown in SEQ ID NO: 140 or substantially the same biological activity of the polypeptide as shown in SEQ ID NO: 140; and
[0504] (v) any combination of i) to iv) above.

[0505] Preferably, the polypeptide comprises at least 2 (in particular, 2, 3 or 4) B3 domains as described herein above. Preferably, said polypeptide also comprises Motif 1-3 and/or Motif 2-3 (preferably, both). Moreover, said polypeptide, preferably, confers enhanced yield-related traits relative to control plants, in particular, increased biomass (in particular increased aboveground and increased root biomass), and improved early vigor (when expressed in a plant).

[0506] Further preferred RTF polypeptides to be applied in the context of the present invention are the Arabidopsis thaliana transcription factors AtREM1 (At4g31610, NM_{—}119310.3, NP_{—}567880.1), AtREM2 (At4g31615, NM_{—}1483872, NP_{—}680753.2) AtREM3 (At4g31620, NM_{—}119311.3, NP_{—}194890.2) AtREM4 (At4g31630, NM_{—}119312.1, NP_{—}194891.1), AtREM5 (At4g31640, NM_{—}119313.2, NP_{—}194892.1) AtREM6 (At4g31650, NM_{—}119314.1, NP_{—}194893.1) AtREM8 (At4g31680, NM_{—}119317.3, NP_{—}194896.2), AtREM9, (At4g31690, NM_{—}119318.1, NP_{—}194897).1, AtREM7 (At4g31660, NM_{—}119315.6, NP_{—}194894.2), AtREM18 (At2g46730 NM_{—}130238.1, NP_{—}566083.1), AtREM13 (At2g24650, NM_{—}001161059.1, NP_{—}001154531.1), AtREM11 (At2g24690, NM_{—}128030.4, NP_{—}180045.4), AtREM12 and (At2g24680, NM_{—}128029.1, NP_{—}180044.1). The first number in the brackets is the TAIR Accession number (The Arabidopsis Information Resource (TAIR), see Swarbreck D, Wilks C, Lamesch P, Berardini T Z, Garcia-Hernandez M, Foerster H, Li D, Meyer T, Muller R, Ploetz L, Radenbaugh A, Singh S, Swing V, Tissier C, Zhang P, Huala E. (2008). The Arabidopsis Information Resource (TAIR): gene structure and function annotation. Nucleic Acids Research, 2008, Vol. 36, Database issue D1009-D1014). The second and third number in the brackets represent the GenBank-Accession-Number of the preferred RTF-polynucleotides (full length CDS) and polypeptide, respectively. Further preferred RTF polynucleotides are from rice and are selected from the group of Os04g27960, Os04g27990, Os06g42630, Os08g30500, and Os03g11370 (for the sequences, see e.g. Conte M G, Gaillard S, Lanau N, Rouard M, Perin C (2008). GreenPhylDB: a database for plant comparative genomics. Nucleic Acids Research. 2008 January; 36 D991-D998).

[0507] Nucleic acid variants may also be useful in practising the methods of the invention. Examples of such variants include nucleic acids encoding homologues and derivatives of any one of the amino acid sequences given in Table A3 of the Examples section, the terms “homologue” and “derivative” being as defined herein. Also useful in the methods of the invention are nucleic acids encoding homologues and derivatives of orthologues or paralogues of any one of the amino acid sequences given in Table A3 of the Examples section. Homologues and derivatives useful in the methods of the present invention have substantially the same biological and functional activity as the unmodified protein from which they are derived. Further variants useful in practising the methods of the invention are variants in which codon usage is optimised or in which miRNA target sites are removed.

[0508] Further nucleic acid variants useful in practising the methods of the invention include portions of nucleic acids encoding RTF polypeptides, nucleic acids hybridising to nucleic acids encoding RTF polypeptides, splice variants of nucleic acids encoding RTF polypeptides, allelic variants of nucleic acids encoding RTF polypeptides and variants of nucleic acids encoding RTF polypeptides obtained by gene shuffling. The terms hybridising sequence, splice variant, allelic variant and gene shuffling are as described herein.

[0509] In one embodiment of the present invention the function of the nucleic acid sequences of the invention is to confer information for a protein that increases yield or yield related traits, when a nucleic acid sequence of the invention is transcribed and translated in a living plant cell.

[0510] Nucleic acids encoding RTF polypeptides need not be full-length nucleic acids, since performance of the methods of the invention does not rely on the use of full-length nucleic acid sequences. According to the present invention, there is provided a method for enhancing yield-related traits in plants, comprising introducing and expressing in a plant a portion of any one of the nucleic acid sequences given in Table A3 of the Examples section, or a portion of a nucleic acid encoding an orthologue, paralogue or homologue of any of the amino acid sequences given in Table A3 of the Examples section.

[0511] A portion of a nucleic acid may be prepared, for example, by making one or more deletions to the nucleic acid. The portions may be used in isolated form or they may be fused to other coding (or non-coding) sequences in order to, for example, produce a protein that combines several activities. When fused to other coding sequences, the resultant polypeptide produced upon translation may be bigger than that predicted for the protein portion.

[0512] Portions useful in the methods, constructs, plants, harvestable parts and products of the invention, encode a RTF polypeptide as defined herein, and have substantially the same biological activity as the amino acid sequences given in Table A3 of the Examples section. Preferably, the portion is a portion of any one of the nucleic acids given in Table A3 of the Examples section, or is a portion of a nucleic acid encoding an orthologue or paralogue of any one of the amino acid sequences given in Table A3 of the Examples section. Preferably the portion is at least 500, 550, 600, 650, 700, 750, 800, 850, 900, 950, 1000, 1100, 1200, 1300, 1400, 1500, 1600, 1700, 1800, 1900, 2000, 2100, 2200, 2300, 2400, 2500, 2600, 2700 or 2763 consecutive nucleotides in length, the consecutive nucleotides being of any one of the nucleic acid sequences given in Table A3 of the Examples section, or of a nucleic acid encoding an orthologue or paralogue of any one of the amino acid sequences given in Table A3 of the Examples section. Most preferably the portion is a portion of the nucleic acid of SEQ ID NO: 139. Preferably, the portion encodes a fragment of an amino acid sequence which, when used in the construction of a phylogenetic tree, such as the one depicted in FIG. 13, clusters with the group of polypeptides which comprises the polypeptide having an amino acid sequence as shown in SEQ ID NO: 140 rather than with any other group, and/or comprises at least two B3 domains (in particular four B3 domains) as outlined herein above), and/or has DNA binding activity, and/or has at least 70% sequence identity to SEQ ID NO: 140.

[0513] Another nucleic acid variant useful in the methods, constructs, plants, harvestable parts and products of the invention is a nucleic acid capable of hybridising, under reduced stringency conditions, preferably under stringent conditions, with a nucleic acid encoding a RTF polypeptide as defined herein, or with a portion as defined herein.

[0514] According to the present invention, there is provided a method for enhancing yield-related traits in plants, comprising introducing and expressing in a plant a nucleic acid capable of hybridizing to any one of the nucleic acids given in Table A3 of the Examples section, or comprising introducing and expressing in a plant a nucleic acid capable of hybridising to a nucleic acid encoding an orthologue, paralogue or homologue of any of the nucleic acid sequences given in Table A3 of the Examples section.

[0515] Hybridising sequences useful in the methods, constructs, plants, harvestable parts and products of the invention encode a RTF polypeptide as defined herein, having substantially the same biological activity as the amino acid sequences given in Table A3 of the Examples section.

[0516] Preferably, the hybridising sequence is capable of hybridising to the complement of any one of the nucleic acids given in Table A3 of the Examples section, or to a portion of any of these sequences, a portion being as defined above, or the hybridising sequence is capable of hybridising to the complement of a nucleic acid encoding an orthologue or paralogue of any one of the amino acid sequences given in Table A3 of the Examples section. Most preferably, the hybridising sequence is capable of hybridising to the complement of a nucleic acid as represented by SEQ ID NO: 139 or to a portion thereof.

[0517] Preferably, the hybridising sequence encodes a polypeptide with an amino acid sequence which, when full-length and used in the construction of a phylogenetic tree, when used in the construction of a phylogenetic tree, such as the one depicted in FIG. 13, clusters with the group of polypeptides which comprises the polypeptide having an amino acid sequence as shown in SEQ ID NO: 140 rather than with any other group, and/or comprises at least two B3 domains (in particular four B3 domains) as outlined herein above), and/or has DNA binding activity, and/or has at least 70% sequence identity to SEQ ID NO: 140.

[0518] In one embodiment the hybridising sequence is capable of hybridising to the complement of a nucleic acid as represented by SEQ ID NO: 139 or to a portion thereof under conditions of medium or high stringency, preferably high stringency as defined above. In another embodiment the hybridising sequence is capable of hybridising to the complement of a nucleic acid as represented by SEQ ID NO: 139 under stringent conditions.

[0519] Another nucleic acid variant useful in the methods, constructs, plants, harvestable parts and products of the invention is a splice variant encoding a RTF polypeptide as defined hereinabove, a splice variant being as defined herein.

[0520] According to the present invention, there is provided a method for enhancing yield-related traits in plants, comprising introducing and expressing in a plant a splice variant of any one of the nucleic acid sequences given in Table A3 of the Examples section, or a splice variant of a nucleic acid encoding an orthologue, paralogue or homologue of any of the amino acid sequences given in Table A3 of the Examples section.

[0521] Preferred splice variants are splice variants of a nucleic acid represented by SEQ ID NO: 139, or a splice variant of a nucleic acid encoding an orthologue or paralogue of SEQ ID NO: 140. Preferably, the amino acid sequence encoded by the splice variant, when used in the construction of a phylogenetic tree, such as the one depicted in FIG. 13, clusters with the group of polypeptides which comprises the polypeptide having an amino acid sequence as shown in SEQ ID NO: 140 rather than with any other group, and/or comprises at least two B3 domains (in particular four B3 domains) as outlined herein above), and/or has DNA binding activity, and/or has at least 70% sequence identity to SEQ ID NO: 140.

[0522] Another nucleic acid variant useful in performing the methods of the invention is an allelic variant of a nucleic acid encoding a RTF polypeptide as defined hereinabove, an allelic variant being as defined herein.

[0523] According to the present invention, there is provided a method for enhancing yield-related traits in plants, comprising introducing and expressing in a plant an allelic variant of any one of the nucleic acids given in Table A3 of the Examples section, or comprising introducing and expressing in a plant an allelic variant of a nucleic acid encoding an orthologue, paralogue or homologue of any of the amino acid sequences given in Table A3 of the Examples section.

[0524] The polypeptides encoded by allelic variants useful in the methods of the present invention have substantially the same biological activity as the RTF polypeptide of SEQ ID NO: 140 and any of the amino acids depicted in Table A3 of the Examples section. Allelic variants exist in nature, and encompassed within the methods of the present invention is the use of these natural alleles. Preferably, the allelic variant is an allelic variant of SEQ ID NO: 139 or an allelic variant of a nucleic acid encoding an orthologue or paralogue of SEQ ID NO: 140. Preferably, the amino acid sequence encoded by the allelic variant, when used in the construction of a phylogenetic tree, such as the one depicted in FIG. 13, clusters with the group of polypeptides which comprises the polypeptide having an amino acid sequence as shown in SEQ ID NO: 140 rather than with any other group, and/or comprises at least two B3 domains (in particular four B3 domains) as outlined herein above), and/or has DNA binding activity, and/or has at least 70% sequence identity to SEQ ID NO: 140.

[0525] Gene shuffling or directed evolution may also be used to generate variants of nucleic acids encoding RTF polypeptides as defined above; the term “gene shuffling” being as defined herein.

[0526] According to the present invention, there is provided a method for enhancing yield-related traits in plants, comprising introducing and expressing in a plant a variant of any one of the nucleic acid sequences given in Table A3 of the Examples section, or comprising introducing and expressing in a plant a variant of a nucleic acid encoding an orthologue, paralogue or homologue of any of the amino acid sequences given in Table A3 of the Examples section, which variant nucleic acid is obtained by gene shuffling.

[0527] Preferably, the amino acid sequence encoded by the variant nucleic acid obtained by gene shuffling, when used in the construction of a phylogenetic tree when used in the construction of a phylogenetic tree, such as the one depicted in FIG. 13, clusters with the group of polypeptides which comprises the polypeptide having an amino acid sequence as shown in SEQ ID NO: 140 rather than with any other group, and/or comprises at least two B3 domains (in particular four B3 domains) as outlined herein above), and/or has DNA binding activity, and/or has at least 70% sequence identity to SEQ ID NO: 140.

[0528] Furthermore, nucleic acid variants may also be obtained by site-directed mutagenesis. Several methods are available to achieve site-directed mutagenesis, the most common being PCR based methods (Current Protocols in Molecular Biology. Wiley Eds.).

[0529] Nucleic acids encoding RTF polypeptides may be derived from any natural or artificial source. The nucleic acid may be modified from its native form in composition and/or genomic environment through deliberate human manipulation. Preferably the RTF polypeptide-encoding nucleic acid is from a plant, further preferably from a from a dicotyledonous plant, further preferably from the family Brassicaceae, more preferably from the genus Arabidopsis, most preferably from Arabidopsis thaliana.

[0530] In another embodiment the present invention extends to recombinant chromosomal DNA comprising a nucleic acid sequence useful in the methods, constructs, plants, harvestable parts and products of the invention, wherein said nucleic acid is present in the chromosomal DNA as a result of recombinant methods, i.e. said nucleic acid is not in the chromosomal DNA in its native surrounding. Said recombinant chromosomal DNA may be a chromosome of native origin, with said nucleic acid inserted by recombinant means, or it may be a mini-chromosome or a non-native chromosomal structure, e.g. or an artificial chromosome. The nature of the chromosomal DNA may vary, as long it allows for stable passing on to successive generations of the recombinant nucleic acid useful in the methods, constructs, plants, harvestable parts and products of the invention, and allows for expression of said nucleic acid in a living plant cell resulting in increased yield or increased yield related traits of the plant cell or a plant comprising the plant cell.

[0531] In a further embodiment the recombinant chromosomal DNA of the invention is comprised in a plant cell. DNA comprised within a cell, particularly a cell with cell walls like a plant cell, is better protected from degradation than a bare nucleic acid sequence. The same holds true for a DNA construct comprised in a host cell, for example a plant cell.

[0532] Performance of the methods of the invention gives plants having enhanced yield-related traits. In particular performance of the methods of the invention gives plants having increased yield, especially increased seed yield relative to control plants. The terms “yield” and “seed yield” are described in more detail in the “definitions” section herein.

[0533] Reference herein to enhanced yield-related traits is taken to mean an increase early vigour and/or in biomass (weight) of one or more parts of a plant, which may include (i) aboveground parts and preferably aboveground harvestable parts and/or (ii) parts below ground and preferably harvestable below ground. In particular, such harvestable parts are roots such as taproots, stems, seeds, and performance of the methods of the invention results in plants having increased seed yield relative to the seed yield of control plants, and/or increased stem biomass relative to the stem biomass of control plants, and/or increased root biomass relative to the root biomass and/or increased beet biomass relative to the beet biomass and/or increased tuber biomass relative to the tuber biomass of control plants. Moreover, it is particularly contemplated that the sugar content (in particular the sucrose content) in the stem (in particular of sugar cane plants) and/or in the belowground parts, in particular in roots including taproots, tubers and/or beets (in particular in sugar beets) is increased relative to the sugar content (in particular the sucrose content) in the corresponding part(s) of the control plant.

[0534] The present invention provides a method for increasing yield-related traits, in particular increased biomass (in particular increased aboveground and increased root biomass), and improved early vigor, relative to control plants, which method comprises modulating expression in a plant of a nucleic acid encoding a RTF polypeptide as defined herein. Preferably, said increased yield related traits obtained under non stress conditions.

[0535] According to a preferred feature of the present invention, performance of the methods of the invention gives plants having an increased growth rate relative to control plants. Therefore, according to the present invention, there is provided a method for increasing the growth rate of plants, which method comprises modulating expression in a plant of a nucleic acid encoding a RTF polypeptide as defined herein.

[0536] Performance of the methods of the invention gives plants grown under non-stress conditions or under mild drought conditions increased yield relative to control plants grown under comparable conditions. Therefore, according to the present invention, there is provided a method for increasing yield in plants grown under non-stress conditions or under mild drought conditions, which method comprises modulating expression in a plant of a nucleic acid encoding a RTF polypeptide.

[0537] Performance of the methods of the invention gives plants grown under conditions of drought, increased yield relative to control plants grown under comparable conditions. Therefore, according to the present invention, there is provided a method for increasing yield in plants grown under conditions of drought which method comprises modulating expression in a plant of a nucleic acid encoding a RTF polypeptide.

[0538] Performance of the methods of the invention gives plants grown under conditions of nutrient deficiency, particularly under conditions of nitrogen deficiency, increased yield relative to control plants grown under comparable conditions. Therefore, according to the present invention, there is provided a method for increasing yield in plants grown under conditions of nutrient deficiency, which method comprises modulating expression in a plant of a nucleic acid encoding a RTF polypeptide.

[0539] Performance of the methods of the invention gives plants grown under conditions of salt stress, increased yield relative to control plants grown under comparable conditions. Therefore, according to the present invention, there is provided a method for increasing yield in plants grown under conditions of salt stress, which method comprises modulating expression in a plant of a nucleic acid encoding a RTF polypeptide.

[0540] The invention also provides genetic constructs and vectors to facilitate introduction and/or expression in plants of nucleic acids encoding RTF polypeptides. The gene constructs may be inserted into vectors, which may be commercially available, suitable for transforming into plants and suitable for expression of the gene of interest in the transformed cells. The invention also provides use of a gene construct as defined herein in the methods of the invention.

[0541] More specifically, the present invention provides a construct comprising:

(a) a nucleic acid encoding a RTF polypeptide as defined above;
(b) one or more control sequences capable of driving expression of the nucleic acid sequence of (a); and optionally
(c) a transcription termination sequence.

[0542] Preferably, the nucleic acid encoding a RTF polypeptide is as defined above. The term “control sequence” and “termination sequence” are as defined herein.

[0543] The invention furthermore provides plants transformed with a construct as described above. In particular, the invention provides plants transformed with a construct as described above, which plants have increased yield-related traits as described herein.

[0544] Plants are transformed with a vector comprising any of the nucleic acids described above. The skilled artisan is well aware of the genetic elements that must be present on the vector in order to successfully transform, select and propagate host cells containing the sequence of interest. The sequence of interest is operably linked to one or more control sequences (at least to a promoter) in the vectors of the invention. In one embodiment the plants of the invention are transformed with an expression cassette comprising any of the nucleic acids described above. The skilled artisan is well aware of the genetic elements that must be present on the expression cassette in order to successfully transform, select and propagate host cells containing the sequence of interest. In the expression cassettes of the invention the sequence of interest is operably linked to one or more control sequences (at least to a promoter). The promoter in such an expression cassette may be a non-native promoter to the nucleic acid described above, i.e. a promoter not regulating the expression of said nucleic acid in its native surrounding.

[0545] In one embodiment the terms expression cassettes of the invention, genetic construct and constructs of the invention are used exchangeably.

[0546] In a further embodiment the expression cassettes of the invention confer increased yield or yield related traits(s) to a living plant cell when they have been introduced into said plant cell and result in expression of the nucleic acid as defined above, comprised in the expression cassette(s).

[0547] The promoter in such expression cassettes may be a non-native promoter to the nucleic acid described above, i.e. a promoter not regulating the expression of said nucleic acid in its native surrounding.

[0548] The expression cassettes of the invention may be comprised in a host cell, plant cell, seed, agricultural product or plant.

[0549] Advantageously, any type of promoter, whether natural or synthetic, may be used to drive expression of the nucleic acid sequence, but preferably the promoter is of plant origin. A constitutive promoter is particularly useful in the methods. Preferably the constitutive promoter is a ubiquitous constitutive promoter of medium strength, in particular, the GOS2 promoter. See the “Definitions” section herein for definitions of the various promoter types. Also useful in the methods, constructs, plants, harvestable parts and products of the invention is a root-specific promoter.

[0550] It should be clear that the applicability of the present invention is not restricted to the RTF polypeptide-encoding nucleic acid represented by SEQ ID NO: 139, nor is the applicability of the invention restricted to expression of a RTF polypeptide-encoding nucleic acid when driven by a constitutive promoter, or when driven by a root-specific promoter.

[0551] The constitutive promoter is preferably a medium strength promoter. More preferably it is a plant derived promoter, e.g. a promoter of plant chromosomal origin, such as a GOS2 promoter or a promoter of substantially the same strength and having substantially the same expression pattern (a functionally equivalent promoter), more preferably the promoter is the promoter GOS2 promoter from rice. Further preferably the constitutive promoter is represented by a nucleic acid sequence substantially similar to SEQ ID NO: 167, most preferably the constitutive promoter is as represented by SEQ ID NO:167. See the “Definitions” section herein for further examples of constitutive promoters.

[0552] In a preferred embodiment, the polynucleotide encoding the RTF polypeptide as used in the plants, constructs and methods of the present invention is linked to a promoter which allows for the expression, preferably the strongest expression in the aboveground parts of the plant as compared to the expression in other parts of the plant. This applies, in particular, if the plant is a monocot. As set forth elsewhere herein, preferred monocots are maize, wheat, rice, or sugarcane. In another preferred embodiment of the present invention, the polynucleotide encoding the RTF polypeptide as used in the plants, constructs and methods of the present invention is preferably linked to a promoter which allows for the expression, preferably the strongest expression in the belowground parts of the plant as compared to the expression in other parts of the plant. This applies, in particular, if the plant is a dicot. Preferred dicots are sugar beet and potato. For example, if the plant is a sugar beet, the promoter, preferably, allows for the strongest expression in the taproot as compared to the expression in other parts of the plant. In one embodiment the promoter used in for expression in sugar beets is, preferably a root specific, more preferably a taproot or beet specific promoter.

[0553] Optionally, one or more terminator sequences may be used in the construct introduced into a plant. Preferably, the construct comprises an expression cassette comprising a GOS2 promoter, substantially similar to SEQ ID NO: 167, operably linked to the nucleic acid encoding the RTF polypeptide. More preferably, the construct comprises a zein terminator (t-zein) linked to the 3′ end of the HAB1 coding sequence. Furthermore, one or more sequences encoding selectable markers may be present on the construct introduced into a plant.

[0554] According to a preferred feature of the invention, the modulated expression is increased expression. Methods for increasing expression of nucleic acids or genes, or gene products, are well documented in the art and examples are provided in the definitions section.

[0555] As mentioned above, a preferred method for modulating expression of a nucleic acid encoding a RTF polypeptide is by introducing and expressing in a plant a nucleic acid encoding a RTF polypeptide; however the effects of performing the method, i.e. enhancing yield-related traits may also be achieved using other well known techniques, including but not limited to T-DNA activation tagging, TILLING, homologous recombination. A description of these techniques is provided in the definitions section.

[0556] The invention also provides a method for the production of transgenic plants having enhanced yield-related traits relative to control plants, comprising introduction and expression in a plant of any nucleic acid encoding a RTF polypeptide as defined hereinabove.

[0557] More specifically, the present invention provides a method for the production of transgenic plants having enhanced yield-related traits, particularly increased yield, which method comprises:

(i) introducing and expressing in a plant or plant cell a RTF polypeptide-encoding nucleic acid or a genetic construct comprising a RTF polypeptide-encoding nucleic acid; and
(ii) cultivating the plant cell under conditions promoting plant growth and development.

[0558] Particularly increased yield related traits are increased biomass (in particular increased aboveground and increased root biomass), and improved early vigor. Preferably, said increased yield related traits obtained under non stress conditions.

[0559] Cultivating the plant cell under conditions promoting plant growth and development, may or may not include regeneration and or growth to maturity.

[0560] The nucleic acid of (i) may be any of the nucleic acids capable of encoding a RTF polypeptide as defined herein.

[0561] The nucleic acid may be introduced directly into a plant cell or into the plant itself (including introduction into a tissue, organ or any other part of a plant). According to a preferred feature of the present invention, the nucleic acid is preferably introduced into a plant by transformation.

[0562] The term “transformation” is described in more detail in the “definitions” section herein.

[0563] In one embodiment the present invention clearly extends to any plant cell or plant produced by any of the methods described herein, and to all plant parts and propagules thereof. The present invention encompasses plants or parts thereof (including seeds) obtainable by the methods according to the present invention. The plants or parts thereof comprise a nucleic acid transgene encoding a RTF polypeptide as defined above. The present invention extends further to encompass the progeny of a primary transformed or transfected cell, tissue, organ or whole plant that has been produced by any of the aforementioned methods, the only requirement being that progeny exhibit the same genotypic and/or phenotypic characteristic(s) as those produced by the parent in the methods according to the invention.

[0564] The present invention also extends in another embodiment to transgenic plant cells and seed comprising the nucleic acid molecule of the invention in a plant expression cassette or a plant expression construct.

[0565] In a further embodiment the seed of the invention recombinantly comprise the expression cassettes of the invention, the (expression) constructs of the invention, the nucleic acids described above and/or the proteins encoded by the nucleic acids as described above.

[0566] A further embodiment of the present invention extends to plant cells comprising the nucleic acid as described above in a recombinant plant expression cassette.

[0567] In yet another embodiment the plant cells of the invention are non-propagative cells, e.g. the cells can not be used to regenerate a whole plant from this cell as a whole using standard cell culture techniques, this meaning cell culture methods but excluding in-vitro nuclear, organelle or chromosome transfer methods. While plants cells generally have the characteristic of totipotency, some plant cells can not be used to regenerate or propagate intact plants from said cells. In one embodiment of the invention the plant cells of the invention are such cells. In another embodiment the plant cells of the invention are plant cells that do not sustain themselves in an autotrophic way. One example are plant cells that do not sustain themselves through photosynthesis by synthesizing carbohydrate and protein from such inorganic substances as water, carbon dioxide and mineral salt.

[0568] In another embodiment the plant cells of the invention are plant cells that do not sustain themselves through photosynthesis by synthesizing carbohydrate and protein from such inorganic substances as water, carbon dioxide and mineral salt, i.e. they may be deemed non-plant variety. In a further embodiment the plant cells of the invention are non-plant variety and non-propagative.

[0569] The invention also includes host cells containing an isolated nucleic acid encoding a RTF polypeptide as defined hereinabove. Host cells of the invention may be any cell selected from the group consisting of bacterial cells, such as E. coli or Agrobacterium species cells, yeast cells, fungal, algal or cyanobacterial cells or plant cells. In one embodiment host cells according to the invention are plant cells, yeasts, bacteria or fungi. Host plants for the nucleic acids or the vector used in the method according to the invention, the expression cassette or construct or vector are, in principle, advantageously all plants, which are capable of synthesizing the polypeptides used in the inventive method.

[0570] In one embodiment the plant cells of the invention overexpress the nucleic acid molecule of the invention.

[0571] The invention also includes methods for the production of a product comprising a) growing the plants of the invention and b) producing said product from or by the plants of the invention or parts, including seeds, of these plants. In a further embodiment the methods comprises steps a) growing the plants of the invention, b) removing the harvestable parts as defined above from the plants and c) producing said product from or by the harvestable parts of the invention. Examples of such methods would be growing corn plants of the invention, harvesting the corn cobs and remove the kernels. These may be used as feedstuff or processed to starch and oil as agricultural products.

[0572] The product may be produced at the site where the plant has been grown, or the plants or parts thereof may be removed from the site where the plants have been grown to produce the product. Typically, the plant is grown, the desired harvestable parts are removed from the plant, if feasible in repeated cycles, and the product made from the harvestable parts of the plant. The step of growing the plant may be performed only once each time the methods of the invention is performed, while allowing repeated times the steps of product production e.g. by repeated removal of harvestable parts of the plants of the invention and if necessary further processing of these parts to arrive at the product. It is also possible that the step of growing the plants of the invention is repeated and plants or harvestable parts are stored until the production of the product is then performed once for the accumulated plants or plant parts. Also, the steps of growing the plants and producing the product may be performed with an overlap in time, even simultaneously to a large extend, or sequentially. Generally the plants are grown for some time before the product is produced.

[0573] Advantageously the methods of the invention are more efficient than the known methods, because the plants of the invention have increased yield and/or stress tolerance to an environmental stress compared to a control plant used in comparable methods.

[0574] In one embodiment the products produced by said methods of the invention are plant products such as, but not limited to, a foodstuff, feedstuff, a food supplement, feed supplement, fiber, cosmetic or pharmaceutical. Foodstuffs are regarded as compositions used for nutrition or for supplementing nutrition. Animal feedstuffs and animal feed supplements, in particular, are regarded as foodstuffs.

[0575] In another embodiment the inventive methods for the production are used to make agricultural products such as, but not limited to, plant extracts, proteins, amino acids, carbohydrates, fats, oils, polymers, vitamins, and the like.

[0576] It is possible that a plant product consists of one ore more agricultural products to a large extent.

[0577] In yet another embodiment the polynucleotide sequences or the polypeptide sequences of the invention are comprised in an agricultural product.

[0578] in a further embodiment the nucleic acid sequences and protein sequences of the invention may be used as product markers, for example for an agricultural product produced by the methods of the invention. Such a marker can be used to identify a product to have been produced by an advantageous process resulting not only in a greater efficiency of the process but also improved quality of the product due to increased quality of the plant material and harvestable parts used in the process. Such markers can be detected by a variety of methods known in the art, for example but not limited to PCR based methods for nucleic acid detection or antibody based methods for protein detection.

[0579] The methods of the invention are advantageously applicable to any plant, in particular to any plant as defined herein. Plants that are particularly useful in the methods of the invention include all plants which belong to the superfamily Viridiplantae, in particular monocotyledonous and dicotyledonous plants including fodder or forage legumes, ornamental plants, food crops, trees or shrubs.

[0580] According to an embodiment of the present invention, the plant is a crop plant. Examples of crop plants include but are not limited to chicory, carrot, cassava, trefoil, soybean, beet, sugar beet, sunflower, canola, alfalfa, rapeseed, linseed, cotton, tomato, potato and tobacco.

[0581] According to another embodiment of the present invention, the plant is a monocotyledonous plant. Examples of monocotyledonous plants include sugarcane.

[0582] According to another embodiment of the present invention, the plant is a cereal. Examples of cereals include rice, maize, wheat, barley, millet, rye, triticale, sorghum, emmer, spelt, einkorn, teff, milo and oats.

[0583] In one preferred embodiment the plants of the invention or used in the methods of the invention are selected from the group consisting of maize, wheat, rice, soybean, cotton, oilseed rape including canola, sugarcane, sugar beet and alfalfa. Especially preferred plants are sugar beet and sugarcane.

[0584] In one embodiment of the present invention the plants of the invention and the plants used in the methods of the invention are sugarbeet plants with increased biomass and/or increased sugar content of the beets. In another embodiment of the present invention the plants of the invention and the plants used in the methods of the invention are sugarcane plants with increased biomass and/or increased sugar content of the stems.

[0585] The invention also extends to harvestable parts of a plant such as, but not limited to seeds, leaves, fruits, flowers, stems, roots, rhizomes, tubers and bulbs, which harvestable parts comprise a recombinant nucleic acid encoding a RTF polypeptide. The invention furthermore relates to products derived or produced, preferably directly derived or directly produced, from a harvestable part of such a plant, such as dry pellets or powders, oil, fat and fatty acids, starch or proteins. In one embodiment the product comprises a recombinant nucleic acid encoding a RTF polypeptide and/or a recombinant RTF polypeptide for example as an indicator of the particular quality of the product.

[0586] The present invention also encompasses use of nucleic acids encoding RTF polypeptides as described herein and use of these RTF polypeptides in enhancing any of the aforementioned yield-related traits in plants. For example, nucleic acids encoding RTF polypeptide described herein, or the RTF polypeptides themselves, may find use in breeding programmes in which a DNA marker is identified which may be genetically linked to a RTF polypeptide-encoding gene. The nucleic acids/genes, or the RTF polypeptides themselves may be used to define a molecular marker. This DNA or protein marker may then be used in breeding programmes to select plants having enhanced yield-related traits as defined hereinabove in the methods of the invention. Furthermore, allelic variants of a RTF polypeptide-encoding nucleic acid/gene may find use in marker-assisted breeding programmes. Nucleic acids encoding RTF polypeptides may also be used as probes for genetically and physically mapping the genes that they are a part of, and as markers for traits linked to those genes. Such information may be useful in plant breeding in order to develop lines with desired phenotypes.

[0587] Any comparison to determine sequence identity percentages is, preferably performed
[0588] in the case of a comparison of nucleic acids over the entire coding region of SEQ ID NO: 139, or
[0589] in the case of a comparison of polypeptide sequences over the entire length of SEQ ID NO: 140.

[0590] For example, a sequence identity of 50% sequence identity in this embodiment means that over the entire coding region of SEQ ID NO: 139, 50 percent of all bases are identical between the sequence of SEQ ID NO: 139 and the related sequence. Similarly, in this embodiment a polypeptide sequence is 50% identical to the polypeptide sequence of SEQ ID NO: 140, when 50 percent of the amino acids residues of the sequence as represented in SEQ ID NO: 140, are found in the polypeptide tested when comparing from the starting methionine to the end of the sequence of SEQ ID NO: 140.

[0591] In a further embodiment the nucleic acid sequence employed in methods, constructs, plants, harvestable parts and products of the invention are those sequences that are not the polynucleotides encoding the proteins selected from the group consisting of the proteins listed in Table A3, and those of at least 60, 70, 75, 80, 85, 90, 93, 95, 98 or 99% nucleotide identity when optimally aligned to the sequences encoding the proteins listed in Table A3.

### C-4. BP1 (Bigger Plant 1) Polypeptide

[0592] Surprisingly, it has now been found that modulating expression in a plant of a nucleic acid encoding a BP1 polypeptide gives plants having enhanced yield-related traits relative to control plants.

[0593] According to a first embodiment, the present invention provides a method for enhancing yield-related traits in plants relative to control plants, comprising modulating expression in a plant of a nucleic acid encoding a BP1 polypeptide and optionally selecting for plants having enhanced yield-related traits. According to another embodiment, the present invention provides a method for producing plants having enhancing yield-related traits relative to control plants, wherein said method comprises the steps of modulating expression in said plant of a nucleic acid encoding a BP1 polypeptide as described herein and optionally selecting for plants having enhanced yield-related traits.

[0594] A preferred method for modulating (preferably, increasing) expression of a nucleic acid encoding a BP1 polypeptide is by introducing and expressing in a plant a nucleic acid encoding a BP1 polypeptide. Preferably, said nucleic acid is over-expressed.

[0595] Any reference hereinafter in section C-4 to a “protein useful in the methods of the invention” is taken to mean a BP1 polypeptide as defined herein. Any reference hereinafter to a “nucleic acid useful in the methods of the invention” is taken to mean a nucleic acid capable of encoding such a BP1 polypeptide. In one embodiment any reference to a protein or nucleic acid “useful in the methods of the invention” is to be understood to mean proteins or nucleic acids “useful in the methods, constructs, plants, harvestable parts and products of the invention”. The nucleic acid to be introduced into a plant (and therefore useful in performing the methods of the invention) is any nucleic acid encoding the type of protein which will now be described, hereafter also named “BP1 nucleic acid” or “BP1 gene”.

[0596] A “BP1 polypeptide” as defined herein, preferably, refers to a polypeptide comprising one or more of the following motifs:

(i) Motif 1-4:
(SEQ ID NO: 276)
LNQ[DG]SXXND[EV]X[NS]DX[QP]G[HQ]X[GN]H[LP]EXXKX[DE][QE][VA][GE]VXE[D
E]X[MI][TA][AP]DV[KN]LS[VA]CRDTG[NE],
(ii) Motif 2-4:
(SEQ ID NO: 277)
L[WR]RDYXD[LV][LV][QK][ED][TN]EXK[KR][KR]LXSX[KN][RK][RT][KS]L[AV]LL[AS]
EVKFL[RQ][RK]K[YL]XSF[AKLP]K[GN][GDN]SQ[QK],
(iii) Motif 3-4:
(SEQ ID NO: 278)
[DE][DG]KRX[VI][PS]WQD[RQ]XALK,
SEQ ID NO: 279
(iv) Motif 4-4 as disclosed as;
SEQ ID NO: 280
(v) Motif 5-4 as disclosed as;
SEQ ID NO: 281
(vi) Motif 6-4 as disclosed as;

[0597] “X”, preferably, represents any amino acid. Particularly preferred amino acid residues for the amino acids indicated with “X” are given in SEQ ID NO: 279 and SEQ ID NO: 292 for Motif 1-4, in SEQ ID NO: 280 and SEQ ID NO: 293 for Motif 2-4, and in SEQ ID NO: 281 and SEQ ID NO: 294 for Motif 3-4. Accordingly, in a preferred embodiment of the present invention, Motif 1-4 has a sequence as shown in SEQ ID NO: 279, Motif 2-4 has a sequence as shown in SEQ ID NO: 280, and Motif 3-4 has a sequence as shown in SEQ ID NO: 281. In a even more preferred embodiment motif 2-4 has a sequence starting with amino acid 40 up to amino acid 88 in SEQ ID NO: 171, motif 1-4 has a sequence starting with amino acid 129 up to amino acid 178 in SEQ ID NO: 171, and motif 3-4 has a sequence starting with amino acid 183 up to amino acid 197 in SEQ ID NO: 171.

[0598] The sequence of Motif 1-4 is also shown in SEQ ID NO: 289. The sequence of Motif 2-4 is also shown in SEQ ID NO: 290. The sequence of Motif 3-4 is also shown in SEQ ID NO: 291.

[0599] In a preferred embodiment, the BP1 polypeptide as set forth in the context of the present invention comprises:
[0600] a) all of the following motifs:

(i) Motif 1-4:
(SEQ ID NO: 276)
LNQ[DG]SXXND[EV]X[NS]DX[QP]G[HQ]X[GN]H[LP]EXXKX[DE][QE][VA][GE]V
XE[DE]X[MI][TA][AP]DV[KN]LS[VA]CRDTG[NE],
(ii) Motif 2-4:
(SEQ ID NO: 277)
L[WR]RDYXD[LV][LV][QK][ED][TN]EXK[KR][KR]XLXSX[KN][RK][RT][KS]L[AV]
LL[AS]EVKFL[RQ][RK]K[YL]XSF[AKLP]K[GN][GDN]SQ[QK],
and
(iii) Motif 3-4:
(SEQ ID NO: 278)
[DE][DG]KRX[VI][PS]WQD[RQ]XALK;
SEQ ID NO: 279
(iv) Motif 4-4 as disclosed as;
SEQ ID NO: 280
(v) Motif 5-4 as disclosed as;
SEQ ID NO: 281
(vi) Motif 6-4 as disclosed as;

[0601] b) any two of the Motifs 1-4 to 6-4, preferably any two of Motifs 4-4 to motif 6-4 as defined in a) above; or
[0602] c) any three of the Motifs 1-4 to 6-4, preferably all three of Motifs 4-4 to motif 6-4 as defined in a) above; or
[0603] d) any one of the Motifs 1-4 to 6-4, preferably any two of Motifs 4-4 to motif 6-4 as defined in a) above.

[0604] Alternatively or additionally the “BP1 polypeptide” as defined herein, preferably, refers to any polypeptide comprising one or more of the following motifs:
[0605] (i) a motif comprising in increasing order of preference at least 70%, 75%, 80%, 85%, 90%, 95%, or more sequence identity to Motif 1-4 or 4-4, preferably, as represented by SEQ ID NO: 276 or by SEQ ID NO: 279, more preferably when compared to motif 4-4,
[0606] (ii) a motif comprising in increasing order of preference at least 70%, 75%, 80%, 85%, 90%, 95%, or more sequence identity to Motif 2-4 or 5-4, preferably, as represented by SEQ ID NO: 277 or by SEQ ID NO: 280, more preferably when compared to motif 5-4,
[0607] (iii) a motif comprising in increasing order of preference at least 70%, 75%, 80%, 85%, 90%, 95%, or more sequence identity to Motif 3-4 or 6-4, preferably, as represented by SEQ ID NO: 278 or by SEQ ID NO: 281, more preferably when compared to motif 6-4.

[0608] Preferred combinations of motifs are given herein above.

[0609] Preferably, the BP1 polypeptide as used in the context of the present invention is selected from the group consisting of:
[0610] (i) a polypeptide comprising a sequence, or consisting of a sequence as shown in SEQ ID NO: 171,
[0611] (ii) a polypeptide which has, in an increasing order of preference, at least 60%, 61%, 62%, 63%, 64%, 65%, 66%, 67%, 68%, 69%, 70%, 71%, 72%, 73%, 74%, 75%, 76%, 77%, 78%, 79%, 80%, 81%, 82%, 83%, 84%, 85%, 86%, 87%, 88%, 89%, 90%, 91%, 92%, 93%, 94%, 95%, 96%, 97%, 98%, or 99% sequence identity to SEQ ID NO: 171,
[0612] (iii) a polypeptide encoded by a polynucleotide which hybridizes under stringent conditions to a polynucleotide having a sequence as shown in SEQ ID NO: 170, or with a complementary sequence of such a polynucleotide having a sequence as shown in SEQ ID NO: 170,
[0613] (iv) a polypeptide with the biological activity of the polypeptide as shown in SEQ ID NO: 171 or substantially the same biological activity of the polypeptide as shown in SEQ ID NO: 171; and
[0614] (v) v) any combination of i) to iv) above

[0615] Preferably, the BP1 polypeptide comprises the motifs, combinations of motifs as set forth herein above.

[0616] The term “BP1” or “BP1 polypeptide” as used herein also intends to include homologues as defined hereunder of “BP1 polypeptide”.

[0617] Motifs 1-4 to 3-4 were derived using the MEME algorithm (Bailey and Elkan, Proceedings of the Second International Conference on Intelligent Systems for Molecular Biology, pp. 28-36, AAAI Press, Menlo Park, Calif., 1994) using the BP1 polypeptides from Oryza sativa (Os09g25410, SEQ ID NO: 171), Panicum virgatum (TC30704, SEQ ID NO: 239), Sorghum bicolor (Sb02g024920, SEQ ID NO: 243), and Zea mays (GRMZM2G093731-T02, SEQ ID NO: 267), see also Table A4. Motifs 4-4, 5-4 and 6-4 were derived manually. The motifs were adjusted in order to bring them in compliance with SEQ ID NO: 171. At each position within a MEME motif, the residues are shown that are present in the query set of sequences with a frequency higher than 0.2. Residues within square brackets represent alternatives.

[0618] More preferably, the BP1 polypeptide comprises in increasing order of preference, at least 1, at least 2, or all 3 motifs of either motifs 1-4 to 3-4 or motifs 4-4 to 6-4. Thus, the BP1 polypeptide preferably comprises Motif 4-4, Motif 5-4 or Motif 6-4. More preferably, the BP1 polypeptide comprises Motifs 4-4 and 5-4, Motifs 5-4 and 6-4 or Motifs 4-4 and 6-4. Most preferably, the BP1 polypeptide comprises Motifs 4-4, 5-4 and 6-4.

[0619] Additionally or alternatively, the BP1 polypeptide as set forth herein or the homologue thereof, preferably, has in increasing order of preference at least 25%, 26%, 27%, 28%, 29%, 30%, 31%, 32%, 33%, 34%, 35%, 36%, 37%, 38%, 39%, 40%, 41%, 42%, 43%, 44%, 45%, 46%, 47%, 48%, 49%, 50%, 51%, 52%, 53%, 54%, 55%, 56%, 57%, 58%, 59%, 60%, 61%, 62%, 63%, 64%, 65%, 66%, 67%, 68%, 69%, 70%, 71%, 72%, 73%, 74%, 75%, 76%, 77%, 78%, 79%, 80%, 81%, 82%, 83%, 84%, 85%, 86%, 87%, 88%, 89%, 90%, 91%, 92%, 93%, 94%, 95%, 96%, 97%, 98%, or 99% overall sequence identity to the amino acid represented by SEQ ID NO: 171. Preferably, the BP1 protein or homologue protein thereof comprises any one or more of the conserved motifs—i.e. of motifs 1-4, 2-4 or 3-4 or motifs 4-4 to 6-4, or the variants having in increasing order of preference at least 70%, 75%, 80%, 85%, 90%, 95%, or more sequence identity to Motif 1-4, 2-4 or 3-4 or motifs 4-4 to 6-4, preferably to motifs 4-4 to 6-4—as outlined above. Preferred combinations of motifs are given herein above.

[0620] In another embodiment, a “BP1 polypeptide” as defined herein, preferably, refers to a BP-like polypeptide comprising one or more of the following motifs: Motif 7-4 as disclosed as SEQ ID NO: 282, motif 8-4 as disclosed as SEQ ID NO: 283, motif 9-4 as disclosed as SEQ ID NO: 284.

[0621] The overall sequence identity is, preferably, determined using a global alignment algorithm, such as the Needleman Wunsch algorithm in the program GAP (GCG Wisconsin Package, Accelrys), preferably with default parameters and preferably with sequences of mature proteins (i.e. without taking into account secretion signals or transit peptides).

[0622] Preferably, the sequence identity level is determined by comparison of the polypeptide sequences over the entire length of the sequence of SEQ ID NO: 171. In another embodiment the sequence identity level of a nucleic acid sequence is determined by comparison of the nucleic acid sequence over the entire length of the coding sequence of the sequence of SEQ ID NO: 170.

[0623] Compared to overall sequence identity, the sequence identity will generally be higher when only conserved domains or motifs are considered. Preferably the motifs in a BP1 polypeptide have, in increasing order of preference, at least 70%, 71%, 72%, 73%, 74%, 75%, 76%, 77%, 78%, 79%, 80%, 81%, 82%, 83%, 84%, 85%, 86%, 87%, 88%, 89%, 90%, 91%, 92%, 93%, 94%, 95%, 96%, 97%, 98%, or 99% sequence identity to any one or more of the motifs represented by SEQ ID NO: 276 to SEQ ID NO: 278 (Motifs 1-4 to 3-4) or motifs 4-4 to 6-4 as represented by SEQ ID NO: 279 to 281. Moreover, preferably, the motifs in a BP1 polypeptide have at least 70%, 71%, 72%, 73%, 74%, 75%, 76%, 77%, 78%, 79%, 80%, 81%, 82%, 83%, 84%, 85%, 86%, 87%, 88%, 89%, 90%, 91%, 92%, 93%, 94%, 95%, 96%, 97%, 98%, or 99% sequence identity to the motif starting with amino acid 40 up to amino acid 88 in SEQ ID NO: 171, and/or to the motif starting with amino acid 129 up to amino acid 178 in SEQ ID NO: 171, and/or to the motif starting with amino acid 183 up to amino acid 197 in SEQ ID NO: 171

[0624] Preferably, the polypeptide sequence which when used in the construction of a phylogenetic tree/circular phylogram, such as the one depicted in FIG. 18, clusters with the group of BP1 polypeptides, particularly with the polypeptide comprising the amino acid sequence represented by SEQ ID NO: 171 (see FIG. 18, Os09g25410), rather than with the other groups (such as the “outgroup” in FIG. 18, or the group of BP1-like polypeptides in FIG. 3). Preferably, said polypeptide comprises one ore more of: motifs 1-4 to 3-4, or motifs 4-4 to 6-4, preferably motifs 4-4 to 6-4 as outlined above, and/or has at least 50%, 51%, 52%, 53%, 54%, 55%, 56%, 57%, 58%, 59%, 60%, 61%, 62%, 63%, 64%, 65%, 66%, 67%, 68%, 69%, 70%, 71%, 72%, 73%, 74%, 75%, 76%, 77%, 78%, 79%, 80%, 81%, 82%, 83%, 84%, 85%, 86%, 87%, 88%, 89%, 90%, 91%, 92%, 93%, 94%, 95%, 96%, 97%, 98%, or 99% sequence identity to SEQ ID NO: 171.

[0625] Preferably, BP1 polypeptides, when expressed in a monocot plant such as rice, maize, wheat or sugarcane according to the methods of the present invention as outlined in the Examples, give plants having at least one increased yield related trait.

[0626] Accordingly, a BP1 polypeptide when expressed in a plant, in particular in a monocot plant such as rice, maize, wheat or sugarcane, preferably, increase at least one of the yield related traits selected from the group consisting of aboveground biomass, root biomass, total seed yield per plant, flowers per panicle, number of filled seeds per plant, increased nitrogen use efficiency and number of thick roots (as compared to a control plant not expressing said BP1 polypeptide). Preferably, said increase of said at least one of the yield related traits is an increase of at least 1%, of at least 2%, more preferably, of at least 3% and, most preferably, of at least 5%. Tools and techniques for measuring whether a yield related traits are increased are described in the Example. Preferably, said increase of said at least one yield related trait is under nitrogen deficiency.

[0627] The present invention is illustrated by transforming plants with the nucleic acid sequence represented by SEQ ID NO: 170, encoding the polypeptide sequence of SEQ ID NO: 171. However, performance of the invention is not restricted to these sequences; the methods of the invention may advantageously be performed using any BP1-encoding nucleic acid or BP1 polypeptide as defined herein.

[0628] Examples of nucleic acids encoding BP1 polypeptides are given in Table A4 of the Examples section herein. Such nucleic acids are useful in performing the methods of the invention. The amino acid sequences given in Table A4 of the Examples section are example sequences of orthologues and paralogues of the BP1 polypeptide represented by SEQ ID NO: 171, the terms “orthologues” and “paralogues” being as defined herein. Further orthologues and paralogues may readily be identified by performing a so-called reciprocal blast search as described in the definitions section; where the query sequence is SEQ ID NO: 170 or SEQ ID NO: 171, the second BLAST (back-BLAST) would be against Oryza sativa sequences.

[0629] Particularly preferred BP1 polypeptide are selected from the BP1 polypeptide from Oryza sativa having an amino acid sequence as shown SEQ ID NO: 171 (see Table A4, Os09g25410), from Panicum virgatum having an amino acid sequence as shown SEQ ID NO: 239 (TC30704), from Sorghum bicolor having an amino acid sequence as shown SEQ ID NO: 243 (Sb02g024920), and from Zea mays having an amino acid sequence as shown SEQ ID NO: 267 (GRMZM2G093731_T02).

[0630] In another preferred embodiment the nucleic acid molecules useful in the methods, uses, transgenic plants, host cells, expression cassettes, vectors and/or products of the invention are nucleic acid molecules encoding the BP1 polypeptide selected from the group consisting of
[0631] (i) a nucleic acid represented by SEQ ID NO: 170;
[0632] (ii) the complement of a nucleic acid represented by SEQ ID NO: 170;
[0633] (iii) a nucleic acid encoding a BP1 polypeptide having in increasing order of preference at least 50%, 51%, 52%, 53%, 54%, 55%, 56%, 57%, 58%, 59%, 60%, 61%, 62%, 63%, 64%, 65%, 66%, 67%, 68%, 69%, 70%, 71%, 72%, 73%, 74%, 75%, 76%, 77%, 78%, 79%, 80%, 81%, 82%, 83%, 84%, 85%, 86%, 87%, 88%, 89%, 90%, 91%, 92%, 93%, 94%, 95%, 96%, 97%, 98%, or 99% sequence identity to the amino acid sequence represented by SEQ ID NO: 170,
[0634] (iv) a nucleic acid molecule which hybridizes with a nucleic acid molecule of (i) to (iii) under high stringency hybridization conditions.

[0635] The polypeptide encoded by said nucleic acid, preferably, comprises one or more motifs having in increasing order of preference at least 50%, 55%, 60%, 65%, 70%, 75%, 80%, 85%, 90%, 95%, 96%, 97%, 98%, 99% or more sequence identity to any one or more of the motifs 1-4 to 3-4 preferably one or more of the motifs 4-4 to 6-4 as outlined elsewhere herein (e.g. shown in SEQ ID NO: 276 to SEQ ID NO: 278). Moreover, it shall preferably confer enhanced yield-related traits relative to control plants.

[0636] Preferably, the sequence identity level of a nucleic acid sequence is determined by comparison of the nucleic acid sequence over the entire length of the coding sequence of the sequence of SEQ ID NO: 170.

[0637] In another preferred embodiment BP1 polypeptides useful in the methods, uses, transgenic plants, host cells, expression cassettes, vectors and/or products of the invention are polypeptides selected from the group consisting of:
[0638] (i) a polypeptide having an amino acid sequence represented by SEQ ID NO: 171;
[0639] (ii) a polypeptide having an amino acid sequence having, in increasing order of preference, at least 50%, 51%, 52%, 53%, 54%, 55%, 56%, 57%, 58%, 59%, 60%, 61%, 62%, 63%, 64%, 65%, 66%, 67%, 68%, 69%, 70%, 71%, 72%, 73%, 74%, 75%, 76%, 77%, 78%, 79%, 80%, 81%, 82%, 83%, 84%, 85%, 86%, 87%, 88%, 89%, 90%, 91%, 92%, 93%, 94%, 95%, 96%, 97%, 98%, or 99% sequence identity to the amino acid sequence represented by SEQ ID NO: 171, and additionally or alternatively comprising one or more motifs having in increasing order of preference at least 50%, 55%, 60%, 65%, 70%, 75%, 80%, 85%, 90%, 95%, 96%, 97%, 98%, 99% or more sequence identity to any one or more of the motifs 1-4 to 3-4 as outlined above (e.g. having a sequence given in SEQ ID NO: 276 to SEQ ID NO: 278), or more preferably one or more of the motifs 4-4 to 6-4 and further preferably conferring enhanced yield-related traits relative to control plants;
[0640] (iii) derivatives of any of the amino acid sequences given in (i) or (ii) above.

[0641] Nucleic acid variants may also be useful in practising the methods of the invention. Examples of such variants include nucleic acids encoding homologues and derivatives of any one of the amino acid sequences given in Table A4 of the Examples section, the terms “homologue” and “derivative” being as defined herein. Also useful in the methods of the invention are nucleic acids encoding homologues and derivatives of orthologues or paralogues of any one of the amino acid sequences given in Table A4 of the Examples section. Homologues and derivatives useful in the methods of the present invention have substantially the same biological and functional activity as the unmodified protein from which they are derived. Further variants useful in practising the methods of the invention are variants in which codon usage is optimised or in which miRNA target sites are removed.

[0642] Further nucleic acid variants useful in practising the methods of the invention include portions of nucleic acids encoding BP1 polypeptides, nucleic acids hybridising to nucleic acids encoding BP1 polypeptides, splice variants of nucleic acids encoding BP1 polypeptides, allelic variants of nucleic acids encoding BP1 polypeptides and variants of nucleic acids encoding BP1 polypeptides obtained by gene shuffling. The terms hybridising sequence, splice variant, allelic variant and gene shuffling are as described herein.

[0643] In one embodiment of the present invention the function of the nucleic acid sequences of the invention is to confer information for a protein that increases yield or yield related traits, when a nucleic acid sequence of the invention is transcribed and translated in a living plant cell.

[0644] Nucleic acids encoding BP1 polypeptides need not be full-length nucleic acids, since performance of the methods of the invention does not rely on the use of full-length nucleic acid sequences. According to the present invention, there is provided a method for enhancing yield-related traits in plants, comprising introducing and expressing in a plant a portion of any one of the nucleic acid sequences given in Table A4 of the Examples section, or a portion of a nucleic acid encoding an orthologue, paralogue or homologue of any of the amino acid sequences given in Table A4 of the Examples section.

[0645] A portion of a nucleic acid may be prepared, for example, by making one or more deletions to the nucleic acid. The portions may be used in isolated form or they may be fused to other coding (or non-coding) sequences in order to, for example, produce a protein that combines several activities. When fused to other coding sequences, the resultant polypeptide produced upon translation may be bigger than that predicted for the protein portion.

[0646] Portions useful in the methods, constructs, plants, harvestable parts and products of the invention, encode a BP1 polypeptide as defined herein, and have substantially the same biological activity as the amino acid sequences given in Table A4 of the Examples section. Preferably, the portion is a portion of any one of the nucleic acids given in Table A4 of the Examples section, or is a portion of a nucleic acid encoding an orthologue or paralogue of any one of the amino acid sequences given in Table A4 of the Examples section. Preferably the portion is at least 500, 550, 600, 650, 700, 750, 800, 850, or 909 consecutive nucleotides in length, the consecutive nucleotides being of any one of the nucleic acid sequences given in Table A4 of the Examples section, or of a nucleic acid encoding an orthologue or paralogue of any one of the amino acid sequences given in Table A4 of the Examples section. Most preferably the portion is a portion of the nucleic acid of SEQ ID NO: 170. Preferably, the portion encodes a fragment of an amino acid sequence which, when used in the construction of a phylogenetic tree/circular phylogram, such as the one depicted in FIG. 18, clusters with the group of BP1 polypeptides comprising the amino acid sequence represented by SEQ ID NO: 171 (and, thus, preferably, with the BP1-proteins in FIG. 18) rather than with any other group, and/or comprises one ore more of motifs 1-4 to 3-4 preferably one or more of the motifs 4-4 to 6-4 as outlined elsewhere herein, and/or has at least 50%, 51%, 52%, 53%, 54%, 55%, 56%, 57%, 58%, 59%, 60%, 61%, 62%, 63%, 64%, 65%, 66%, 67%, 68%, 69%, 70%, 71%, 72%, 73%, 74%, 75%, 76%, 77%, 78%, 79%, 80%, 81%, 82%, 83%, 84%, 85%, 86%, 87%, 88%, 89%, 90%, 91%, 92%, 93%, 94%, 95%, 96%, 97%, 98%, or 99% sequence identity to SEQ ID NO: 171.

[0647] Another nucleic acid variant useful in the methods, constructs, plants, harvestable parts and products of the invention is a nucleic acid capable of hybridising, under reduced stringency conditions, preferably under stringent conditions, with a nucleic acid encoding a BP1 polypeptide as defined herein, or with a portion as defined herein.

[0648] According to the present invention, there is provided a method for enhancing yield-related traits in plants, comprising introducing and expressing in a plant a nucleic acid capable of hybridizing to any one of the nucleic acids given in Table A4 of the Examples section, or comprising introducing and expressing in a plant a nucleic acid capable of hybridising to a nucleic acid encoding an orthologue, paralogue or homologue of any of the nucleic acid sequences given in Table A4 of the Examples section.

[0649] Hybridising sequences useful in the methods, constructs, plants, harvestable parts and products of the invention encode a BP1 polypeptide as defined herein, having substantially the same biological activity as the amino acid sequences given in Table A4 of the Examples section. Preferably, the hybridising sequence is capable of hybridising to the complement of any one of the nucleic acids given in Table A4 of the Examples section, or to a portion of any of these sequences, a portion being as defined above, or the hybridising sequence is capable of hybridising to the complement of a nucleic acid encoding an orthologue or paralogue of any one of the amino acid sequences given in Table A4 of the Examples section. Most preferably, the hybridising sequence is capable of hybridising to the complement of a nucleic acid as represented by SEQ ID NO: 170 or to a portion thereof.

[0650] Preferably, the hybridising sequence encodes a polypeptide with an amino acid sequence which, when full-length and when used in the construction of a phylogenetic tree/circular phylogram, such as the one depicted in FIG. 18, clusters with the group of BP1 polypeptides comprising the amino acid sequence represented by SEQ ID NO: 171 (and, thus, preferably, with the BP1-proteins in FIG. 18) rather than with any other group, and/or comprises one ore more of motifs 1-4 to 3-4 preferably one or more of the motifs 4-4 to 6-4 as outlined elsewhere herein, and/or has at least 50%, 51%, 52%, 53%, 54%, 55%, 56%, 57%, 58%, 59%, 60%, 61%, 62%, 63%, 64%, 65%, 66%, 67%, 68%, 69%, 70%, 71%, 72%, 73%, 74%, 75%, 76%, 77%, 78%, 79%, 80%, 81%, 82%, 83%, 84%, 85%, 86%, 87%, 88%, 89%, 90%, 91%, 92%, 93%, 94%, 95%, 96%, 97%, 98%, or 99% sequence identity to SEQ ID NO: 171.

[0651] In one embodiment the hybridising sequence is capable of hybridising to the complement of a nucleic acid as represented by SEQ ID NO: 170 or to a portion thereof under conditions of medium or high stringency, preferably high stringency as defined above. In another embodiment the hybridising sequence is capable of hybridising to the complement of a nucleic acid as represented by SEQ ID NO: 170 under stringent conditions.

[0652] Another nucleic acid variant useful in the methods, constructs, plants, harvestable parts and products of the invention is a splice variant encoding a BP1 polypeptide as defined hereinabove, a splice variant being as defined herein.

[0653] According to the present invention, there is provided a method for enhancing yield-related traits in plants, comprising introducing and expressing in a plant a splice variant of any one of the nucleic acid sequences given in Table A4 of the Examples section, or a splice variant of a nucleic acid encoding an orthologue, paralogue or homologue of any of the amino acid sequences given in Table A4 of the Examples section.

[0654] Preferred splice variants are splice variants of a nucleic acid represented by SEQ ID NO: 170, or a splice variant of a nucleic acid encoding an orthologue or paralogue of SEQ ID NO: 171. Preferably, the amino acid sequence encoded by the splice variant, when used in the construction of a phylogenetic tree/circular phylogram, such as the one depicted in FIG. 18, clusters with the group of BP1 polypeptides comprising the amino acid sequence represented by SEQ ID NO: 171 (and, thus, preferably, with the BP1-proteins in FIG. 18) rather than with any other group, comprises one or more of motifs 1-4 to 3-4, preferably one or more of the motifs 4-4 to 6-4 as outlined elsewhere herein, and/or has at least 50%, 51%, 52%, 53%, 54%, 55%, 56%, 57%, 58%, 59%, 60%, 61%, 62%, 63%, 64%, 65%, 66%, 67%, 68%, 69%, 70%, 71%, 72%, 73%, 74%, 75%, 76%, 77%, 78%, 79%, 80%, 81%, 82%, 83%, 84%, 85%, 86%, 87%, 88%, 89%, 90%, 91%, 92%, 93%, 94%, 95%, 96%, 97%, 98%, or 99% sequence identity to SEQ ID NO: 171.

[0655] Another nucleic acid variant useful in performing the methods of the invention is an allelic variant of a nucleic acid encoding a BP1 polypeptide as defined hereinabove, an allelic variant being as defined herein.

[0656] According to the present invention, there is provided a method for enhancing yield-related traits in plants, comprising introducing and expressing in a plant an allelic variant of any one of the nucleic acids given in Table A4 of the Examples section, or comprising introducing and expressing in a plant an allelic variant of a nucleic acid encoding an orthologue, paralogue or homologue of any of the amino acid sequences given in Table A4 of the Examples section.

[0657] The polypeptides encoded by allelic variants useful in the methods of the present invention have substantially the same biological activity as the BP1 polypeptide of SEQ ID NO: 171 and any of the amino acids depicted in Table A4 of the Examples section. Allelic variants exist in nature, and encompassed within the methods of the present invention is the use of these natural alleles. Preferably, the allelic variant is an allelic variant of SEQ ID NO: 170 or an allelic variant of a nucleic acid encoding an orthologue or paralogue of SEQ ID NO: 171. Preferably, the amino acid sequence encoded by the allelic variant, when used in the construction of a phylogenetic tree/circular phylogram, such as the one depicted in FIG. 18, clusters with the group of BP1 polypeptides comprising the amino acid sequence represented by SEQ ID NO: 171 (and, thus, preferably, with the BP1-proteins in FIG. 18) rather than with any other group, comprises one or more of motifs 1-4 to 3-4, preferably one or more of the motifs 4-4 to 6-4 as outlined elsewhere herein, and/or has at least 50%, 51%, 52%, 53%, 54%, 55%, 56%, 57%, 58%, 59%, 60%, 61%, 62%, 63%, 64%, 65%, 66%, 67%, 68%, 69%, 70%, 71%, 72%, 73%, 74%, 75%, 76%, 77%, 78%, 79%, 80%, 81%, 82%, 83%, 84%, 85%, 86%, 87%, 88%, 89%, 90%, 91%, 92%, 93%, 94%, 95%, 96%, 97%, 98%, or 99% sequence identity to SEQ ID NO: 171.

[0658] Gene shuffling or directed evolution may also be used to generate variants of nucleic acids encoding BP1 polypeptides as defined above; the term “gene shuffling” being as defined herein.

[0659] According to the present invention, there is provided a method for enhancing yield-related traits in plants, comprising introducing and expressing in a plant a variant of any one of the nucleic acid sequences given in Table A4 of the Examples section, or comprising introducing and expressing in a plant a variant of a nucleic acid encoding an orthologue, paralogue or homologue of any of the amino acid sequences given in Table A4 of the Examples section, which variant nucleic acid is obtained by gene shuffling.

[0660] Preferably, the amino acid sequence encoded by the variant nucleic acid obtained by gene shuffling, when used in the construction of a phylogenetic tree/circular phylogram, such as the one depicted in FIG. 18, clusters with the group of BP1 polypeptides comprising the amino acid sequence represented by SEQ ID NO: 171 (and, thus, preferably, with the BP1-proteins in FIG. 18) rather than with any other group, and/or comprises one ore more of motifs 1-4 to 3-4, preferably one or more of the motifs 4-4 to 6-4 as outlined elsewhere herein, and/or has at least 50%, 51%, 52%, 53%, 54%, 55%, 56%, 57%, 58%, 59%, 60%, 61%, 62%, 63%, 64%, 65%, 66%, 67%, 68%, 69%, 70%, 71%, 72%, 73%, 74%, 75%, 76%, 77%, 78%, 79%, 80%, 81%, 82%, 83%, 84%, 85%, 86%, 87%, 88%, 89%, 90%, 91%, 92%, 93%, 94%, 95%, 96%, 97%, 98%, or 99% sequence identity to SEQ ID NO: 171.

[0661] Furthermore, nucleic acid variants may also be obtained by site-directed mutagenesis. Several methods are available to achieve site-directed mutagenesis, the most common being PCR based methods (Current Protocols in Molecular Biology. Wiley Eds.).

[0662] Nucleic acids encoding BP1 polypeptides may be derived from any natural or artificial source. The nucleic acid may be modified from its native form in composition and/or genomic environment through deliberate human manipulation. Preferably the BP1 polypeptide-encoding nucleic acid is from a plant, further preferably from a monocotyledonous plant, more preferably from the family Poaceae, more preferably from the genus Oryza most preferably the nucleic acid is from Oryza sativa.

[0663] In another embodiment the present invention extends to recombinant chromosomal DNA comprising a nucleic acid sequence useful in the methods, constructs, plants, harvestable parts and products of the invention, wherein said nucleic acid is present in the chromosomal DNA as a result of recombinant methods, i.e. said nucleic acid is not in the chromosomal DNA in its native surrounding. Said recombinant chromosomal DNA may be a chromosome of native origin, with said nucleic acid inserted by recombinant means, or it may be a mini-chromosome or a non-native chromosomal structure, e.g. or an artificial chromosome. The nature of the chromosomal DNA may vary, as long it allows for stable passing on to successive generations of the recombinant nucleic acid useful in the methods of the invention, and allows for expression of said nucleic acid in a living plant cell resulting in increased yield or increased yield related traits of the plant cell or a plant comprising the plant cell.

[0664] In a further embodiment the recombinant chromosomal DNA of the invention is comprised in a plant cell. DNA comprised within a cell, particularly a cell with cell walls like a plant cell, is better protected from degradation than a bare nucleic acid sequence. The same holds true for a DNA construct comprised in a host cell, for example a plant cell.

[0665] Performance of the methods of the invention gives plants having enhanced yield-related traits. In particular performance of the methods of the invention gives plants having increased yield, especially increased seed yield or increased biomass relative to control plants. The terms “yield” and “seed yield” are described in more detail in the “definitions” section herein.

[0666] Reference herein to enhanced yield-related traits is taken to mean an increase seed yield and/or in biomass (weight) of one or more parts of a plant, which may include (i) aboveground parts and preferably aboveground harvestable parts and/or (ii) parts below ground and preferably harvestable below ground. In particular, such harvestable parts are roots such as taproots, stems, seeds, and performance of the methods of the invention results in plants having increased seed yield relative to the seed yield of control plants, and/or increased stem biomass relative to the stem biomass of control plants, and/or increased root biomass relative to the root biomass and/or increased beet biomass relative to the beet biomass and/or increased tuber biomass relative to the tuber biomass of control plants. Moreover, it is particularly contemplated that the sugar content (in particular the sucrose content) in the stem (in particular of sugar cane plants) and/or in the belowground parts, in particular in roots including taproots, tubers and/or beets (in particular in sugar beets) is increased relative to the sugar content (in particular the sucrose content) in corresponding part(s) of the control plant.

[0667] The present invention provides a method for increasing yield related traits, especially seed yield and/or of plants, relative to control plants, which method comprises modulating expression in a plant of a nucleic acid encoding a BP1 polypeptide as defined herein.

[0668] According to a preferred feature of the present invention, performance of the methods of the invention gives plants having an increased growth rate relative to control plants. Therefore, according to the present invention, there is provided a method for increasing the growth rate of plants, which method comprises modulating expression in a plant of a nucleic acid encoding a BP1 polypeptide as defined herein. Preferably, by modulating expression of the BP1 polypeptide at least one of the yield-related trait selected from aboveground biomass, root biomass, root thickness, root length is increased. In particular, the increased trait is aboveground or root biomass. Preferably, the yield-related traits are increased under nitrogen limiting conditions, in particular under nitrogen deficient conditions.

[0669] Performance of the methods of the invention gives plants grown under non-stress conditions or under mild drought conditions increased yield relative to control plants grown under comparable conditions. Therefore, according to the present invention, there is provided a method for increasing yield in plants grown under non-stress conditions or under mild drought conditions, which method comprises modulating expression in a plant of a nucleic acid encoding a BP1 polypeptide.

[0670] Performance of the methods of the invention gives plants grown under conditions of nutrient deficiency, particularly under conditions of nitrogen deficiency, increased yield relative to control plants grown under comparable conditions. Therefore, according to the present invention, there is provided a method for increasing yield in plants grown under conditions of nutrient deficiency, which method comprises modulating expression in a plant of a nucleic acid encoding a BP1 polypeptide.

[0671] Performance of the methods of the invention gives plants grown under conditions of salt stress, increased yield relative to control plants grown under comparable conditions. Therefore, according to the present invention, there is provided a method for increasing yield in plants grown under conditions of salt stress, which method comprises modulating expression in a plant of a nucleic acid encoding a BP1 polypeptide.

[0672] The invention also provides genetic constructs and vectors to facilitate introduction and/or expression in plants of nucleic acids encoding BP1 polypeptides. The gene constructs may be inserted into vectors, which may be commercially available, suitable for transforming into plants and suitable for expression of the gene of interest in the transformed cells. The invention also provides use of a gene construct as defined herein in the methods of the invention.

[0673] More specifically, the present invention provides a construct comprising:

(a) a nucleic acid encoding a BP1 polypeptide as defined above;
(b) one or more control sequences capable of driving expression of the nucleic acid sequence of (a); and optionally
(c) a transcription termination sequence.

[0674] Preferably, the nucleic acid encoding a BP1 polypeptide is as defined above. The term “control sequence” and “termination sequence” are as defined herein.

[0675] The invention furthermore provides plants transformed with a construct as described above. In particular, the invention provides plants transformed with a construct as described above, which plants have increased yield-related traits as described herein.

[0676] Plants are transformed with a vector comprising any of the nucleic acids described above. The skilled artisan is well aware of the genetic elements that must be present on the vector in order to successfully transform, select and propagate host cells containing the sequence of interest. The sequence of interest is operably linked to one or more control sequences (at least to a promoter) in the vectors of the invention.

[0677] In one embodiment the plants of the invention are transformed with an expression cassette comprising any of the nucleic acids described above. The skilled artisan is well aware of the genetic elements that must be present on the expression cassette in order to successfully transform, select and propagate host cells containing the sequence of interest. In the expression cassettes of the invention the sequence of interest is operably linked to one or more control sequences (at least to a promoter). The promoter in such an expression cassette may be a non-native promoter to the nucleic acid described above, i.e. a promoter not regulating the expression of said nucleic acid in its native surrounding.

[0678] In one embodiment the terms expression cassettes of the invention, genetic construct and constructs of the invention are used exchangeably.

[0679] In a further embodiment the expression cassettes of the invention confer increased yield or yield related traits(s) to a living plant cell when they have been introduced into said plant cell and result in expression of the nucleic acid as defined above, comprised in the expression cassette(s). The promoter in such expression cassettes may be a non-native promoter to the nucleic acid described above, i.e. a promoter not regulating the expression of said nucleic acid in its native surrounding.

[0680] The expression cassettes of the invention may be comprised in a host cell, plant cell, seed, agricultural product or plant.

[0681] Advantageously, any type of promoter, whether natural or synthetic, may be used to drive expression of the nucleic acid sequence, but preferably the promoter is of plant origin. A constitutive promoter is particularly useful in the methods. Preferably the constitutive promoter is a ubiquitous constitutive promoter of medium strength. See the “Definitions” section herein for definitions of the various promoter types.

[0682] It should be clear that the applicability of the present invention is not restricted to the BP1 polypeptide-encoding nucleic acid represented by SEQ ID NO: 170, nor is the applicability of the invention restricted to expression of a BP1 polypeptide-encoding nucleic acid when driven by a constitutive promoter.

[0683] The constitutive promoter is preferably a medium strength promoter. More preferably it is a plant derived promoter, e.g. a promoter of plant chromosomal origin, such as a GOS2 promoter or a promoter of substantially the same strength and having substantially the same expression pattern (a functionally equivalent promoter), more preferably the promoter is the promoter GOS2 promoter from rice. Further preferably the constitutive promoter is represented by a nucleic acid sequence substantially similar to SEQ ID NO: 285, most preferably the constitutive promoter is as represented by SEQ ID NO: 285. See the “Definitions” section herein for further examples of constitutive promoters.

[0684] According to another preferred feature of the invention, the nucleic acid encoding a BP1 polypeptide is operably linked to a root-specific promoter.

[0685] In a preferred embodiment, the polynucleotide encoding the BP1 polypeptide as used in the plants, constructs and methods of the present invention is linked to a promoter which allows for the expression, preferably the strongest expression in the aboveground parts of the plant as compared to the expression in other parts of the plant. This applies, in particular, if the plant is a monocot. As set forth elsewhere herein, preferred monocots are maize, wheat, rice, or sugarcane. In another preferred embodiment of the present invention, the polynucleotide encoding the BP1 polypeptide as used in the plants, constructs and methods of the present invention is preferably linked to a promoter which allows for the expression, preferably the strongest expression in the belowground parts of the plant as compared to the expression in other parts of the plant. This applies, in particular, if the plant is a dicot. Preferred dicots are sugar beet and potato. For example, if the plant is a sugar beet, the promoter, preferably, allows for the strongest expression in the taproot as compared to the expression in other parts of the plant. In one embodiment the promoter used in for expression in sugar beets is, preferably a root specific, more preferably a taproot or beet specific promoter.

[0686] Optionally, one or more terminator sequences may be used in the construct introduced into a plant. Preferably, the construct comprises an expression cassette comprising a GOS2 promoter, substantially similar to SEQ ID NO: 285 operably linked to the nucleic acid encoding the BP1 polypeptide. More preferably, the construct comprises a zein terminator (t-zein) linked to the 3′ end of the coding sequence for the BP1 polypeptide. Most preferably, the expression cassette comprises a sequence having in increasing order of preference at least 95%, at least 96%, at least 97%, at least 98%, at least 99% identity to the pGOS2::BP1::t-zein sequence comprised by the expression vector having a sequence as shown in SEQ ID NO: 286 (see also FIG. 19).

[0687] Furthermore, one or more sequences encoding selectable markers may be present on the construct introduced into a plant.

[0688] According to a preferred feature of the invention, the modulated expression is increased expression. Methods for increasing expression of nucleic acids or genes, or gene products, are well documented in the art and examples are provided in the definitions section.

[0689] As mentioned above, a preferred method for modulating expression of a nucleic acid encoding a BP1 polypeptide is by introducing and expressing in a plant a nucleic acid encoding a BP1 polypeptide; however the effects of performing the method, i.e. enhancing yield-related traits may also be achieved using other well known techniques, including but not limited to T-DNA activation tagging, TILLING, homologous recombination. A description of these techniques is provided in the definitions section.

[0690] The invention also provides a method for the production of transgenic plants having enhanced yield-related traits relative to control plants, comprising introduction and expression in a plant of any nucleic acid encoding a BP1 polypeptide as defined hereinabove.

[0691] More specifically, the present invention provides a method for the production of transgenic plants having enhanced yield-related traits, preferably increased biomass or increased yield, more preferably, enhances yield related traits as described in Example XI-4, which method comprises:

(i) introducing and expressing in a plant or plant cell a BP1 polypeptide-encoding nucleic acid or a genetic construct comprising a BP1 polypeptide-encoding nucleic acid; and
(ii) cultivating the plant cell under conditions promoting plant growth and development.

[0692] Cultivating the plant cell under conditions promoting plant growth and development, may or may not include regeneration and or growth to maturity.

[0693] The nucleic acid of (i) may be any of the nucleic acids capable of encoding a BP1 polypeptide as defined herein.

[0694] The nucleic acid may be introduced directly into a plant cell or into the plant itself (including introduction into a tissue, organ or any other part of a plant). According to a preferred feature of the present invention, the nucleic acid is preferably introduced into a plant by transformation. The term “transformation” is described in more detail in the “definitions” section herein.

[0695] In one embodiment the present invention clearly extends to any plant cell or plant produced by any of the methods described herein, and to all plant parts and propagules thereof. The present invention encompasses plants or parts thereof (including seeds) obtainable by the methods according to the present invention. The plants or parts thereof comprise a nucleic acid transgene encoding a BP1 polypeptide as defined above. The present invention extends further to encompass the progeny of a primary transformed or transfected cell, tissue, organ or whole plant that has been produced by any of the aforementioned methods, the only requirement being that progeny exhibit the same genotypic and/or phenotypic characteristic(s) as those produced by the parent in the methods according to the invention.

[0696] The present invention also extends in another embodiment to transgenic plant cells and seed comprising the nucleic acid molecule of the invention in a plant expression cassette or a plant expression construct.

[0697] In a further embodiment the seed of the invention recombinantly comprise the expression cassettes of the invention, the (expression) constructs of the invention, the nucleic acids described above and/or the proteins encoded by the nucleic acids as described above.

[0698] A further embodiment of the present invention extends to plant cells comprising the nucleic acid as described above in a recombinant plant expression cassette.

[0699] In yet another embodiment the plant cells of the invention are non-propagative cells, e.g. the cells can not be used to regenerate a whole plant from this cell as a whole using standard cell culture techniques, this meaning cell culture methods but excluding in-vitro nuclear, organelle or chromosome transfer methods. While plants cells generally have the characteristic of totipotency, some plant cells can not be used to regenerate or propagate intact plants from said cells. In one embodiment of the invention the plant cells of the invention are such cells. In another embodiment the plant cells of the invention are plant cells that do not sustain themselves in an autotrophic way. One example are plant cells that do not sustain themselves through photosynthesis by synthesizing carbohydrate and protein from such inorganic substances as water, carbon dioxide and mineral salt.

[0700] In another embodiment the plant cells of the invention are plant cells that do not sustain themselves through photosynthesis by synthesizing carbohydrate and protein from such inorganic substances as water, carbon dioxide and mineral salt, i.e. they may be deemed non-plant variety. In a further embodiment the plant cells of the invention are non-plant variety and non-propagative.

[0701] The invention also includes host cells containing an isolated nucleic acid encoding a BP1 polypeptide as defined hereinabove. Host cells of the invention may be any cell selected from the group consisting of bacterial cells, such as E. coli or Agrobacterium species cells, yeast cells, fungal, algal or cyanobacterial cells or plant cells. In one embodiment host cells according to the invention are plant cells, yeasts, bacteria or fungi. Host plants for the nucleic acids or the vector used in the method according to the invention, the expression cassette or construct or vector are, in principle, advantageously all plants, which are capable of synthesizing the polypeptides used in the inventive method.

[0702] In one embodiment the plant cells of the invention overexpress the nucleic acid molecule of the invention, i.e. nucleic acid molecule encoding the BP1 polypeptide.

[0703] The invention also includes methods for the production of a product comprising a) growing the plants of the invention and b) producing said product from or by the plants of the invention or parts, including seeds, of these plants. In a further embodiment the methods comprises steps a) growing the plants of the invention, b) removing the harvestable parts as defined above from the plants and c) producing said product from or by the harvestable parts of the invention. Examples of such methods would be growing corn plants of the invention, harvesting the corn cobs and remove the kernels. These may be used as feedstuff or processed to starch and oil as agricultural products.

[0704] The product may be produced at the site where the plant has been grown, or the plants or parts thereof may be removed from the site where the plants have been grown to produce the product. Typically, the plant is grown, the desired harvestable parts are removed from the plant, if feasible in repeated cycles, and the product made from the harvestable parts of the plant. The step of growing the plant may be performed only once each time the methods of the invention is performed, while allowing repeated times the steps of product production e.g. by repeated removal of harvestable parts of the plants of the invention and if necessary further processing of these parts to arrive at the product. It is also possible that the step of growing the plants of the invention is repeated and plants or harvestable parts are stored until the production of the product is then performed once for the accumulated plants or plant parts. Also, the steps of growing the plants and producing the product may be performed with an overlap in time, even simultaneously to a large extend, or sequentially. Generally the plants are grown for some time before the product is produced.

[0705] Advantageously the methods of the invention are more efficient than the known methods, because the plants of the invention have increased yield and/or stress tolerance to an environmental stress compared to a control plant used in comparable methods.

[0706] In one embodiment the products produced by said methods of the invention are plant products such as, but not limited to, a foodstuff, feedstuff, a food supplement, feed supplement, fiber, cosmetic or pharmaceutical. Foodstuffs are regarded as compositions used for nutrition or for supplementing nutrition. Animal feedstuffs and animal feed supplements, in particular, are regarded as foodstuffs.

[0707] In another embodiment the inventive methods for the production are used to make agricultural products such as, but not limited to, plant extracts, proteins, amino acids, carbohydrates, fats, oils, polymers, vitamins, and the like.

[0708] It is possible that a plant product consists of one ore more agricultural products to a large extent.

[0709] In yet another embodiment the polynucleotide sequences or the polypeptide sequences of the invention are comprised in an agricultural product. in a further embodiment the nucleic acid sequences and protein sequences of the invention may be used as product markers, for example for an agricultural product produced by the methods of the invention. Such a marker can be used to identify a product to have been produced by an advantageous process resulting not only in a greater efficiency of the process but also improved quality of the product due to increased quality of the plant material and harvestable parts used in the process. Such markers can be detected by a variety of methods known in the art, for example but not limited to PCR based methods for nucleic acid detection or antibody based methods for protein detection.

[0710] The methods of the invention are advantageously applicable to any plant, in particular to any plant as defined herein. Plants that are particularly useful in the methods of the invention include all plants which belong to the superfamily Viridiplantae, in particular monocotyledonous and dicotyledonous plants including fodder or forage legumes, ornamental plants, food crops, trees or shrubs.

[0711] According to an embodiment of the present invention, the plant is a crop plant. Examples of crop plants include but are not limited to chicory, carrot, cassava, trefoil, soybean, beet, sugar beet, sunflower, canola, alfalfa, rapeseed, linseed, cotton, tomato, potato and tobacco.

[0712] According to another embodiment of the present invention, the plant is a monocotyledonous plant. Examples of monocotyledonous plants include sugarcane.

[0713] According to another embodiment of the present invention, the plant is a cereal. Examples of cereals include rice, maize, wheat, barley, millet, rye, triticale, sorghum, emmer, spelt, einkorn, teff, milo and oats.

[0714] In one embodiment the plants of the invention or used in the methods of the invention are selected from the group consisting of maize, wheat, rice, soybean, cotton, oilseed rape including canola, sugarcane, sugar beet and alfalfa.

[0715] In another embodiment of the present invention the plants of the invention and the plants used in the methods of the invention are sugarbeet plants with increased biomass and/or increased sugar content of the beets, or sugar cane plants with increased sugar content.

[0716] The invention also extends to harvestable parts of a plant such as, but not limited to seeds, leaves, fruits, flowers, stems, roots, rhizomes, tubers and bulbs, which harvestable parts comprise a recombinant nucleic acid encoding a BP1 polypeptide. The invention furthermore relates to products derived or produced, preferably directly derived or directly produced, from a harvestable part of such a plant, such as dry pellets or powders, oil, fat and fatty acids, starch or proteins. In one embodiment the product comprises a recombinant nucleic acid encoding a BP1 polypeptide and/or a recombinant BP1 polypeptide. In one embodiment the product comprises a recombinant nucleic acid encoding a BP1 polypeptide and/or a recombinant BP1 polypeptide for example as an indicator of the particular quality of the product.

[0717] The present invention also encompasses use of nucleic acids encoding BP1 polypeptides as described herein and use of these BP1 polypeptides in enhancing any of the aforementioned yield-related traits in plants. For example, nucleic acids encoding BP1 polypeptide described herein, or the BP1 polypeptides themselves, may find use in breeding programmes in which a DNA marker is identified which may be genetically linked to a BP1 polypeptide-encoding gene. The nucleic acids/genes, or the BP1 polypeptides themselves may be used to define a molecular marker. This DNA or protein marker may then be used in breeding programmes to select plants having enhanced yield-related traits as defined hereinabove in the methods of the invention. Furthermore, allelic variants of a BP1 polypeptide-encoding nucleic acid/gene may find use in marker-assisted breeding programmes. Nucleic acids encoding BP1 polypeptides may also be used as probes for genetically and physically mapping the genes that they are a part of, and as markers for traits linked to those genes. Such information may be useful in plant breeding in order to develop lines with desired phenotypes.

[0718] In one embodiment any comparison to determine sequence identity percentages is performed
[0719] in the case of a comparison of nucleic acids over the entire coding region of SEQ ID NO: 170, or
[0720] in the case of a comparison of polypeptide sequences over the entire length of SEQ ID NO: 171.

[0721] For example, a sequence identity of 50% sequence identity in this embodiment means that over the entire coding region of SEQ ID NO: 170, 50 percent of all bases are identical between the sequence of SEQ ID NO: 170 and the related sequence. Similarly, in this embodiment a polypeptide sequence is 50% identical to the polypeptide sequence of SEQ ID NO: 171, when 50 percent of the amino acids residues of the sequence as represented in SEQ ID NO: 171, are found in the polypeptide tested when comparing from the starting methionine to the end of the sequence of SEQ ID NO: 171.

[0722] In a further embodiment the nucleic acid sequence employed in the invention are those sequences that are not the polynucleotides encoding the proteins selected from the group consisting of the proteins listed in Table A4, and those of at least 60, 70, 75, 80, 85, 90, 93, 95, 98 or 99% nucleotide identity when optimally aligned to the sequences encoding the proteins listed in Table A4.

[0723] In one embodiment, the sequence of the nucleic acid encoding said BP1 polypeptide or the sequence of the BP1 polypeptide is, preferably, not the sequence as shown in SEQ ID NO: 1907, 30374, 19675, and/or 48067 as disclosed in US20060123505, and, preferably, not the sequence as shown in SEQ ID NO: 75649 and/or 178132 as disclosed in US20030135870.

[0724] Moreover, the sequence of the nucleic acid encoding said BP1 polypeptide or the sequence of the BP1 polypeptide is, preferably, not the sequence as shown in SEQ ID NO: 75649 as disclosed in US2004123343, and, preferably, not the sequence as shown in SEQ ID NO: 64503 as disclosed in WO2009/091518, SEQ ID NO: 53534 as disclosed in US2004/172684.

### D. ITEMS

[0725] In the following, the expression “as defined in claim/item X” is meant to direct the artisan to apply the definition as disclosed in item/claim X. For example, “a nucleic acid as defined in item 1” has to be understood so that the definition of the nucleic acid as in item 1 is to be applied to the nucleic acid. In consequence the term “as defined in item” or “as defined in claim” may be replaced with the corresponding definition of that item or claim, respectively.

### D-1. TLP (Tify Like Protein) Polypeptide—Items

[0726] The explanations and definitions given herein above in section C-1 apply mutatis mutandis to the following items (in D-1).

### Item D-1-1 to D-1-24

[0727] 1. A method for enhancing yield-related traits in plants relative to control plants, comprising modulating expression, preferably increasing expression, in a plant of a nucleic acid encoding a TLP polypeptide,
   [0728] (i) wherein said TLP polypeptide comprises a domain having the Pfam accession number PF06200 and/or a Pfam domain having the accessing number PF09425, preferably both domains, and/or
   [0729] (ii) wherein said polypeptide comprises an Interpro domain having the Interpro accession number IPR010399 and/or an Interpro domain having the Interpro accession number IPR018467, preferably both domains.
[0730] 2. Method according to Item 1, wherein said modulated expression is effected by introducing and expressing in a plant said nucleic acid encoding said TLP polypeptide.
[0731] 3. Method according to Item 1 or 2, wherein said enhanced yield-related traits comprise increased yield relative to control plants, and preferably comprise increased biomass and/or increased seed yield relative to control plants.
[0732] 4. Method according to any one of Items 1 to 3, wherein said enhanced yield-related traits are obtained under non-stress conditions.
[0733] 5. Method according to any one of Items 1 to 3, wherein said enhanced yield-related traits are obtained under conditions of drought stress, salt stress or nitrogen deficiency.
[0734] 6. Method according to any of Items 1 to 4, wherein said TLP polypeptide comprises one or more of the following motifs:

(i) Motif 1-1: (SEQ ID NO: 35 ):
QLTIFY[AG]G[SM]V[NC]V[YF][DE][DN][IV]S[PA]EKAQ[AE][IL]M,
(ii) Motif 2-1: (SEQ ID NO: 37):
PQARKASLARFLEKRKERV[MT][NST][TAL][AS]PY,
(iii) Motif 3-1: (SEQ ID NO: 39):
MERDF[LM]GL[NGSI][IS]K[DEN][PS][LP][LA][VT][VI]K[DE]Exxx[SD][SG]
(iv) Motif 4-1
(SEQ ID NO: 40)
Q[LM]TIFY[AG]G[SMATL]V[NCS][VI][YF][DEN][DN][IV][STP][PAV][ED][KQ]A[QK][AE]
[IL]MFLA[GS][HNR].

[0735] (v) any of the Motifs 1-1a, 2-1a, 4-1a, 4-1b, 5-1, 6-1 or 7-1 as defined herein above.
[0736] 7. Method according to any one of Items 1 to 6, wherein said nucleic acid encoding a TLP is of plant origin, preferably from a dicotyledonous plant, further preferably from the family Solanceae, more preferably from the genus Solanum, most preferably from Solanum lycopersicum.
[0737] 8. Method according to any one of Items 1 to 7, wherein said nucleic acid encoding a TLP encodes any one of the polypeptides listed in Table A1 or is a portion of such a nucleic acid, or a nucleic acid capable of hybridising with such a nucleic acid.
[0738] 9. Method according to any one of Items 1 to 8, wherein said nucleic acid sequence encodes an orthologue or paralogue of any of the polypeptides given in Table A1.
[0739] 10. Method according to any one of Items 1 to 9, wherein said nucleic acid encodes the polypeptide represented by SEQ ID NO: 2.
[0740] 11. Method according to any one of Items 1 to 10, wherein said nucleic acid is operably linked to a constitutive promoter, preferably to a medium strength constitutive promoter, preferably to a plant promoter, more preferably to a GOS2 promoter, most preferably to a GOS2 promoter from rice.
[0741] 12. Plant, plant part thereof, including seeds, or plant cell, obtainable by a method according to any one of Items 1 to 11, wherein said plant, plant part or plant cell comprises a recombinant nucleic acid encoding a TLP polypeptide as defined in any of Items 1 and 6 to 11.
[0742] 13. Construct comprising:
   [0743] (i) nucleic acid encoding a TLP as defined in any of Items 1 and 6 to 11;
   [0744] (ii) one or more control sequences capable of driving expression of the nucleic acid sequence of (i); and optionally
   [0745] (iii) a transcription termination sequence.
[0746] 14. Construct according to Item 13, wherein one of said control sequences is a constitutive promoter, preferably a medium strength constitutive promoter, preferably to a plant promoter, more preferably a GOS2 promoter, most preferably a GOS2 promoter from rice.
[0747] 15. Use of a construct according to Item 13 or 14 in a method for making plants having enhanced yield-related traits, preferably increased yield relative to control plants, and more preferably increased seed yield and/or increased biomass relative to control plants.
[0748] 16. Plant, plant part or plant cell transformed with a construct according to Item 13 or 14.
[0749] 17. Method for the production of a transgenic plant having enhanced yield-related traits relative to control plants, preferably increased yield relative to control plants, and more preferably increased seed yield and/or increased biomass relative to control plants, comprising:
   [0750] (i) introducing and expressing in a plant cell or plant a nucleic acid encoding a TLP polypeptide as defined in any of Items 1 and 6 to 11; and
   [0751] (ii) cultivating said plant cell or plant under conditions promoting plant growth and development.
[0752] 18. Transgenic plant having enhanced yield-related traits relative to control plants, preferably increased yield relative to control plants, and more preferably increased seed yield and/or increased biomass, resulting from modulated expression of a nucleic acid encoding a TLP polypeptide as defined in any of Items 1 and 6 to 11 or a transgenic plant cell derived from said transgenic plant.
[0753] 19. Transgenic plant according to Item 12, 16 or 18, or a transgenic plant cell derived therefrom, wherein said plant is a crop plant, such as beet, sugarbeet or alfalfa; or a monocotyledonous plant such as sugarcane; or a cereal, such as rice, maize, wheat, barley, millet, rye, triticale, sorghum, emmer, spelt, einkorn, teff, milo or oats.
[0754] 20. Harvestable parts of a plant according to Item 19, wherein said harvestable parts are preferably shoot biomass and/or seeds.
[0755] 21. Products derived from a plant according to Item 19 and/or from harvestable parts of a plant according to Item 20.
[0756] 22. Use of a nucleic acid encoding a TLP polypeptide as defined in any of Items 1 and 6 to 11 for enhancing yield-related traits in plants relative to control plants, preferably for increasing yield, and more preferably for increasing seed yield and/or for increasing biomass in plants relative to control plants.
[0757] 23. A method for the production of a product comprising the steps of growing the plants according to Item 12, 16 or 18 and producing said product from or by
   [0758] a. said plants; or
   [0759] b. parts, including seeds, of said plants.
[0760] 24. Construct according to Item 13 or 14 comprised in a plant cell

### Other Particularly Preferred Embodiments

### Item D-1-A to D-1-W:

[0761] A. A method for enhancing yield in plants relative to control plants, comprising modulating expression, preferably increasing expression, in a plant of a nucleic acid molecule encoding a polypeptide, preferably a TLP polypeptide,
   [0762] i) wherein said polypeptide comprises at least one PF06200 Pfam domain and/or PF09425 Pfam domain, preferably both, and/or
   [0763] ii) wherein said polypeptide comprises an Interpro domain IPR010399 and/or an Interpro domain IPR018467, preferably both.
[0764] B. Method according to item A, wherein said polypeptide comprises one or more of the following motifs:

Motif 1-1 (SEQ ID NO: 35): QLTI-
FY[AG]G[SM]V[NC]V[YF][DE][DN][IV]S[PA]EKAQ[AE]
[IL]M;
Motif 2-1 (SEQ ID NO: 37):
PQARKASLARFLEKRKERV[MT][NST][TAL][AS]PY;
Motif 3-1 (SEQ ID NO: 39):
MERDF[LM]GL[NGSI][IS]K[DEN][PS][LP][LA][VT][VI]K
[DE]Exxx[SD][SG];
wherein “X”, preferably, represents any amino
acid,
Motif 4-1 (SEQ ID NO: 40):
Q[LM]TIFY[AG]G[SMATL]V[NCS][VI][YF][DEN][DN][IV]
[STP][PAV][ED][KQ]A[QK][AE][IL]MFLA[GS][HNR];
Motif 5-1 (SEQ ID NO: 43):
RFLEKRKE;
Motif 6-1 (SEQ ID NO: 44):
QLTIFY[AG]G;
Motif 7-1 (SEQ ID NO: 45):
MERDF[LM]GL;

[0765] or any of motifs 1-1a, 2-1a, 4-1a or 4-1b as defined herein above
[0766] C. Method according to item A or B, wherein said modulated expression is effected by introducing and expressing in a plant a nucleic acid molecule encoding a TLP polypeptide.
[0767] D. Method according to any one of items A to C, wherein said polypeptide is encoded by a nucleic acid molecule comprising a nucleic acid molecule selected from the group consisting of:
[0768] (i) a nucleic acid represented by any one of SEQ ID NO: 1, 3, 5, 7, 9, 11, 13, 15, 17, 19, 21, 23, 25, 27, 29, 31, or 33;
[0769] (ii) the complement of a nucleic acid represented by any one of SEQ ID NO: 1, 3, 5, 7, 9, 11, 13, 15, 17, 19, 21, 23, 25, 27, 29, 31, or 33;
[0770] (iii) a nucleic acid encoding the polypeptide as represented by any one of SEQ ID NO: 2, 4, 6, 8, 10, 12, 14, 16, 18, 20, 22, 24, 26, 28, 30, 32, or 34, preferably as a result of the degeneracy of the genetic code, said isolated nucleic acid can be deduced from a polypeptide sequence as represented by any one of SEQ ID NO: 2, 4, 6, 8, 10, 12, 14, 16, 18, 20, 22, 24, 26, 28, 30, 32, or 34, and further preferably confers enhanced yield-related traits relative to control plants (as described herein elsewhere);
[0771] (iv) a nucleic acid having, in increasing order of preference at least 30%, 31%, 32%, 33%, 34%, 35%, 36%, 37%, 38%, 39%, 40%, 41%, 42%, 43%, 44%, 45%, 46%, 47%, 48%, 49%, 50%, 51%, 52%, 53%, 54%, 55%, 56%, 57%, 58%, 59%, 60%, 61%, 62%, 63%, 64%, 65%, 66%, 67%, 68%, 69%, 70%, 71%, 72%, 73%, 74%, 75%, 76%, 77%, 78%, 79%, 80%, 81%, 82%, 83%, 84%, 85%, 86%, 87%, 88%, 89%, 90%, 91%, 92%, 93%, 94%, 95%, 96%, 97%, 98%, or 99% sequence identity with any of the nucleic acid sequences of SEQ ID NO: 1, 3, 5, 7, 9, 11, 13, 15, 17, 19, 21, 23, 25, 27, 29, 31, or 33;
[0772] (v) a first nucleic acid molecule which hybridizes with a second nucleic acid molecule of (i) to (iv) under stringent hybridization conditions and preferably confers enhanced yield-related traits relative to control plants;
[0773] (vi) a nucleic acid encoding said polypeptide having, in increasing order of preference, at least 50%, 51%, 52%, 53%, 54%, 55%, 56%, 57%, 58%, 59%, 60%, 61%, 62%, 63%, 64%, 65%, 66%, 67%, 68%, 69%, 70%, 71%, 72%, 73%, 74%, 75%, 76%, 77%, 78%, 79%, 80%, 81%, 82%, 83%, 84%, 85%, 86%, 87%, 88%, 89%, 90%, 91%, 92%, 93%, 94%, 95%, 96%, 97%, 98%, or 99% sequence identity to the amino acid sequence represented by any one of SEQ ID NO: 2, 4, 6, 8, 10, 12, 14, 16, 18, 20, 22, 24, 26, 28, 30, 32, or 34, and preferably conferring enhanced yield-related traits relative to control plants; or
[0774] (vii) a nucleic acid comprising any combination(s) of features of (i) to (vi) above.
[0775] E. Method according to any item A to D, wherein said enhanced yield-related traits comprise increased yield, preferably seed yield and/or shoot biomass relative to control plants.
[0776] F. Method according to any one of items A to E, wherein said enhanced yield-related traits are obtained under non-stress conditions.
[0777] G. Method according to any one of items A to E, wherein said enhanced yield-related traits are obtained under conditions of drought stress, salt stress or nitrogen deficiency.
[0778] H. Method according to any one of items A to G, wherein said nucleic acid is operably linked to a constitutive promoter, preferably to a GOS2 promoter, most preferably to a GOS2 promoter from rice.
[0779] I. Method according to any one of items A to H, wherein said nucleic acid molecule or said polypeptide, respectively, is of plant origin, preferably from a dicotyledonous plant, further preferably from the family Solanaceae, more preferably from the genus Solanum, most preferably from Solanum lycopersicum.
[0780] J. Plant or part thereof, including seeds, obtainable by a method according to any one of items A to I, wherein said plant or part thereof comprises a recombinant nucleic acid encoding said polypeptide as defined in any one of items A to I.
[0781] K. Construct comprising:
[0782] (i) nucleic acid encoding said polypeptide as defined in any one of items A to H;
[0783] (ii) one or more control sequences capable of driving expression of the nucleic acid sequence of (a); and optionally
[0784] (iii) a transcription termination sequence.
[0785] L. Construct according to item K, wherein one of said control sequences is a constitutive promoter, preferably a GOS2 promoter, most preferably a GOS2 promoter from rice.
[0786] M. Use of a construct according to item K or L in a method for making plants having increased yield, particularly seed yield and/or shoot biomass and/or root biomass relative to control plants relative to control plants.
[0787] N. Plant, plant part or plant cell transformed with a construct according to item K or L or obtainable by a method according to any one of items A to 9, wherein said plant or part thereof comprises a recombinant nucleic acid encoding said polypeptide as defined in any one of items A to J.
[0788] O. Method for the production of a transgenic plant having increased yield, particularly increased biomass and/or increased seed yield relative to control plants, comprising:
[0789] (i) introducing and expressing in a plant a nucleic acid encoding said polypeptide as defined in any one of items A to H; and
[0790] (ii) cultivating the plant cell under conditions promoting plant growth and development.
[0791] P. Plant having increased yield, particularly increased biomass and/or increased seed yield, relative to control plants, resulting from modulated expression of a nucleic acid encoding said polypeptide, or a transgenic plant cell originating from or being part of said transgenic plant.
[0792] Q. A method for the production of a product comprising the steps of growing the plants of the invention and producing said product from or by
   [0793] a. the plants of the invention; or
   [0794] b. parts, including seeds, of these plants.
[0795] R. Plant according to item J, N, or P, or a transgenic plant cell originating thereof, or a method according to item Q, wherein said plant is a crop plant, preferably a dicot such as sugar beet, alfalfa, trefoil, chicory, carrot, cassava, cotton, soybean, canola or a monocot, such as sugarcane, or a cereal, such as rice, maize, wheat, barley, millet, rye, triticale, sorghum emmer, spelt, secale, einkorn, teff, milo and oats.
[0796] S. Harvestable parts of a plant according to item J, wherein said harvestable parts are preferably shoot and/or root biomass and/or seeds.
[0797] T. Products produced from a plant according to item J and/or from harvestable parts of a plant according to item R.
[0798] U. Use of a nucleic acid encoding a polypeptide as defined in any one of items A to H in increasing yield, particularly seed yield and/or shoot biomass relative to control plants.
[0799] V. Construct according to item K or L comprised in a plant cell.
[0800] W. Recombinant chromosomal DNA comprising the construct according to item K or L.

### D-2. PMP22 Polypeptide (22 kDa Peroxisomal Membrane Like Polypeptide)—Items

[0801] The explanations and definitions given herein above in section C-2 apply mutatis mutandis to the following items (in D-2).

### Items D-2-1 to D-2-27

[0802] 1. A method for enhancing yield-related traits in plants relative to control plants, comprising modulating expression, preferably increasing expression, in a plant of a nucleic acid encoding PMP22 (22 kDa Peroxisomal Membrane protein) polypeptide, wherein said PMP22 polypeptide comprises a Pfam domain having the pfam accession number PF04117, and/or an Interpro domain having the Interpro Accession number IPR007248.
[0803] 2. Method according to Item 1, wherein said modulated expression is effected by introducing and expressing in a plant said nucleic acid encoding said PMP22 polypeptide.
[0804] 3. Method according to Item 1 or 2, wherein said enhanced yield-related traits comprise increased yield relative to control plants, and preferably comprise increased biomass and/or increased seed yield relative to control plants.
[0805] 4. Method according to any one of Items 1 to 3, wherein said enhanced yield-related traits are obtained under non-stress conditions.
[0806] 5. Method according to any one of Items 1 to 3, wherein said enhanced yield-related traits are obtained under conditions of drought stress, salt stress or nitrogen deficiency.
[0807] 6. Method according to any of Items 1 to 5, wherein said PMP22 polypeptide comprises one or more of the following motifs:

| | | |
|---|---|---|
| (i) | Motif 1-2: | (SEQ ID NO: 126) |
| | GDWIAQC[YF]EGKPLFE[FI]DR[AT]RM[FL]RSGLVGFTLHGSLSHYYY[QH]FCE[AE] | |
| | LFPF[QKE], | |
| (ii) | Motif 2-2: | (SEQ ID NO: 127) |
| | LTID[HQ]DYWHGWT[LI][FY]EILRY[AM]P[QE]HNW[VSI]AYE[EQ]ALK[RTA] | |
| | NPVLAKM, | |
| (iii) | Motif 3-2: | (SEQ ID NO: 128) |
| | [DE]WWVVP[AV]KVAFDQT[VA]W[SA]A[IV]WN; | |
| (iv) | or any of the motifs 4-2 to 9-2 as defined herein above. | |

[0808] 7. Method according to any one of Items 1 to 6, wherein said nucleic acid encoding a PMP22 is of plant origin, preferably from a dicotyledonous plant, further preferably from the family Solanaceae, more preferably from the genus Solanum, most preferably from Solanum lycopersicum.
[0809] 8. Method according to any one of Items 1 to 7, wherein said nucleic acid encoding a PMP22 encodes any one of the polypeptides listed in Table A2 or is a portion of such a nucleic acid, or a nucleic acid capable of hybridising with the complementary sequence of such a nucleic acid.
[0810] 9. Method according to any one of Items 1 to 8, wherein said nucleic acid sequence encodes an orthologue or paralogue of any of the polypeptides given in Table A2.
[0811] 10. Method according to any one of Items 1 to 9, wherein said nucleic acid encodes the polypeptide represented by SEQ ID NO: 51.
[0812] 11. Method according to any one of Items 1 to 10, wherein said nucleic acid is operably linked to a constitutive promoter, preferably to a medium strength constitutive promoter, preferably to a plant promoter, more preferably to a GOS2 promoter, most preferably to a GOS2 promoter from rice.
[0813] 12. Plant, plant part thereof, including seeds, or plant cell, obtainable by a method according to any one of Items 1 to 11, wherein said plant, plant part or plant cell comprises a recombinant nucleic acid encoding a PMP22 polypeptide as defined in any of Items 1 and 6 to 11.
[0814] 13. Construct comprising:
   [0815] (i) nucleic acid encoding a PMP22 as defined in any of Items 1 and 6 to 11;
   [0816] (ii) one or more control sequences capable of driving expression of the nucleic acid sequence of (i); and optionally
   [0817] (iii) a transcription termination sequence.
[0818] 14. Construct according to Item 13, wherein one of said control sequences is a constitutive promoter, preferably a medium strength constitutive promoter, preferably to a plant promoter, more preferably a GOS2 promoter, most preferably a GOS2 promoter from rice.
[0819] 15. Use of a construct according to Item 13 or 14 in a method for making plants having enhanced yield-related traits, preferably increased yield relative to control plants, and more preferably increased seed yield and/or increased biomass relative to control plants.
[0820] 16. Plant, plant part or plant cell transformed with a construct according to Item 13 or 14.
[0821] 17. Method for the production of a transgenic plant having enhanced yield-related traits relative to control plants, preferably increased yield relative to control plants, and more preferably increased seed yield and/or increased biomass relative to control plants, comprising:
   [0822] (i) introducing and expressing in a plant cell or plant a nucleic acid encoding a PMP22 polypeptide as defined in any of Items 1 and 6 to 11; and
   [0823] (ii) cultivating said plant cell or plant under conditions promoting plant growth and development.
[0824] 18. Transgenic plant having enhanced yield-related traits relative to control plants, preferably increased yield relative to control plants, and more preferably increased seed yield and/or increased biomass, resulting from modulated expression of a nucleic acid encoding a PMP22 polypeptide as defined in any of Items 1 and 6 to 11 or a transgenic plant cell derived from said transgenic plant.
[0825] 19. Transgenic plant according to Item 12, 16 or 18, or a transgenic plant cell derived therefrom, wherein said plant is a crop plant, such as beet, sugarbeet or alfalfa; or a monocotyledonous plant such as sugarcane; or a cereal, such as rice, maize, wheat, barley, millet, rye, triticale, sorghum, emmer, spelt, einkorn, teff, milo or oats.
[0826] 20. Harvestable parts of a plant according to Item 19, wherein said harvestable parts are preferably shoot biomass and/or seeds.
[0827] 21. Products derived from a plant according to Item 19 and/or from harvestable parts of a plant according to Item 20.
[0828] 22. Use of a nucleic acid encoding a PMP22 polypeptide as defined in any of Items 1 and 6 to 11 for enhancing yield-related traits in plants relative to control plants, preferably for increasing yield, and more preferably for increasing seed yield and/or for increasing biomass in plants relative to control plants.
[0829] 23. A method for the production of a product comprising the steps of growing the plants according to Item 12, 16 or 18 and producing said product from or by
   [0830] (i) said plants; or
   [0831] (ii) parts, including seeds, of said plants.
[0832] 24. Construct according to Item 13 or 14 comprised in a plant cell.
[0833] 25. Any of the preceding Items, wherein the sequence of the nucleic acid encodes said PMP22 polypeptide or the sequence of the PMP22 polypeptide is not the sequence as shown in SEQ ID NO: 20 as disclosed in WO2004/035798, as shown in SEQ ID NO: 5180 as disclosed in EP 1 586 645 A2, as shown in SEQ ID NO: 277535 as disclosed in US2004031072, as shown in SEQ ID NO: 42604 as disclosed in JP2005185101, as shown in SEQ ID NO: 302211 as disclosed in US2004214272, SEQ ID NO: 6940 as disclosed in US2009019601, or SEQ ID NO: 69977 or SEQ ID NO: 51830 as disclosed in US2007011783.
[0834] 26. An isolated nucleic acid molecule selected from:
   [0835] (i) a nucleic acid represented by SEQ ID NO: 56, 90, or 104;
   [0836] (ii) the complement of a nucleic acid represented by SEQ ID NO: 56, 90, or 104;
   [0837] (iii) a nucleic acid encoding a PMP22 polypeptide having in increasing order of preference at least 50%, 51%, 52%, 53%, 54%, 55%, 56%, 57%, 58%, 59%, 60%, 61%, 62%, 63%, 64%, 65%, 66%, 67%, 68%, 69%, 70%, 71%, 72%, 73%, 74%, 75%, 76%, 77%, 78%, 79%, 80%, 81%, 82%, 83%, 84%, 85%, 86%, 87%, 88%, 89%, 90%, 91%, 92%, 93%, 94%, 95%, 96%, 97%, 98%, 99%, or 100% sequence identity to the amino acid sequence represented by SEQ ID NO: 57, 91 or 105, and further preferably conferring enhanced yield-related traits relative to control plants.
   [0838] (iv) a nucleic acid molecule which hybridizes with a nucleic acid molecule of (i) to (iii) under high stringency hybridization conditions and preferably confers enhanced yield-related traits relative to control plants.
[0839] 27. An isolated polypeptide selected from:
   [0840] (i) an amino acid sequence represented by SEQ ID NO: 57, 91 or 105;
   [0841] (ii) an amino acid sequence having, in increasing order of preference, at least 50%, 51%, 52%, 53%, 54%, 55%, 56%, 57%, 58%, 59%, 60%, 61%, 62%, 63%, 64%, 65%, 66%, 67%, 68%, 69%, 70%, 71%, 72%, 73%, 74%, 75%, 76%, 77%, 78%, 79%, 80%, 81%, 82%, 83%, 84%, 85%, 86%, 87%, 88%, 89%, 90%, 91%, 92%, 93%, 94%, 95%, 96%, 97%, 98%, or 99% sequence identity to the amino acid sequence represented by SEQ ID NO: 57, 91 or 105, and preferably conferring enhanced yield-related traits relative to control plants; and
   [0842] (iii) derivatives of any of the amino acid sequences given in (i) or (ii) above.

### Other Embodiments

### Item D-2-A to D-2-W:

[0843] A. A method for enhancing yield in plants relative to control plants, comprising modulating expression, preferably increasing expression, in a plant of a nucleic acid molecule encoding a polypeptide, preferably, a PMP22 protein, wherein said polypeptide comprises comprising a Pfam domain having the Pfam accession number PF04117 and/or an Interpro domain having the accession number IPR007248.
[0844] B. Method according to item A, wherein said polypeptide comprises one or more of the following motifs:

Motif 1-2 (SEQ ID NO: 126):
GDWIAQC[YF]EGKPLFE[FI]DR[AT]RM[FL]RSGLVGFTLHGSLSHYYY[QH]FCE[AE]LFPF
[QKE];
Motif 2-2 (SEQ ID NO: 127):
LTID[HQ]DYWHGWT[LI][FY]EILRY[AM]P[QE]HNW[VSI]AYE[EQ]ALK[RTA]NPVLAKM;
Motif 3-2 (SEQ ID NO: 128):
[DE]WWVVP[AV]KVAFDQT[VA]W[SA]A[IV]WN;
Motif 4-2 (SEQ ID NO: 129):
LVGFT-
LHGSLSHYYY[QH][FIL]CEALFPF[QKE][DE]WWVVP[AV]KVAFDQT[VI]WSAIWNSIYF;
Motif 5-2 (SEQ ID NO: 130):
RY[AM]P[EQ]HNW[ISV]AYE[EQ]ALK[AR]NPVLAKM[VAM]ISG[VI]VYS[LIV]GDWIAQCYE
GKP[LI]F[ED][FI]D;
Motif 6-2 (SEQ ID NO: 131):
AHL[IV]TYG[VL][IV]PVEQRLLWVDC;
Motif 7-2 (SEQ ID NO: 132):
RYAPQHNW[IV]AYEEALK[RQ]NPVLAKMVISGVVYS[VL]GDWIAQCYEGKPLF[ED][IF]D;
Motif 8-2 (SEQ ID NO: 133):
GFT-
LHGSLSH[YF]YYQFCE[AE]LFPF[QE]DWWVVP[VA]KVAFDQTVWSAIWNSIY[FY]TV;
and
Motif 9-2 (SEQ ID NO: 134):
F[LW]PMLTAGWKLWPFAHLITYG[VL][VI]PVEQRLLWVDCVEL[IV]WVTILSTYSNEK.

[0845] C. Method according to item A or B, wherein said modulated expression is effected by introducing and expressing in a plant a nucleic acid molecule encoding a PMP22 protein.
[0846] D. Method according to any one of items A to C, wherein said polypeptide is encoded by a nucleic acid molecule comprising a nucleic acid molecule selected from the group consisting of:
[0847] (i) a nucleic acid represented by any one of SEQ ID NO: 50, 52, 54, 56, 58, 60, 62, 64, 66, 68, 70, 72, 74, 76, 78, 80, 82, 84, 86, 88, 90, 92, 94, 96, 98, 100, 102, 104, 106, 108, 110, 112, 114, 116, 118, 120, 122, or 124;
[0848] (ii) the complement of a nucleic acid represented by any one of SEQ ID NO: 50, 52, 54, 56, 58, 60, 62, 64, 66, 68, 70, 72, 74, 76, 78, 80, 82, 84, 86, 88, 90, 92, 94, 96, 98, 100, 102, 104, 106, 108, 110, 112, 114, 116, 118, 120, 122, or 124;
[0849] (iii) a nucleic acid encoding the polypeptide as represented by any one of SEQ ID NO: 51, 53, 55, 57, 59, 61, 63, 65, 67, 69, 71, 73, 75, 77, 79, 81, 83, 85, 87, 89, 91, 93, 95, 97, 99, 101, 103, 105, 107, 109, 111, 113, 115, 117, 119, 121, 123, or 125, preferably as a result of the degeneracy of the genetic code, said isolated nucleic acid can be deduced from a polypeptide sequence as represented by (any one of) SEQ ID NO: 51, 53, 55, 57, 59, 61, 63, 65, 67, 69, 71, 73, 75, 77, 79, 81, 83, 85, 87, 89, 91, 93, 95, 97, 99, 101, 103, 105, 107, 109, 111, 113, 115, 117, 119, 121, 123, or 125 and further preferably confers enhanced yield-related traits relative to control plants;
[0850] (iv) a nucleic acid having, in increasing order of preference at least 30%, 31%, 32%, 33%, 34%, 35%, 36%, 37%, 38%, 39%, 40%, 41%, 42%, 43%, 44%, 45%, 46%, 47%, 48%, 49%, 50%, 51%, 52%, 53%, 54%, 55%, 56%, 57%, 58%, 59%, 60%, 61%, 62%, 63%, 64%, 65%, 66%, 67%, 68%, 69%, 70%, 71%, 72%, 73%, 74%, 75%, 76%, 77%, 78%, 79%, 80%, 81%, 82%, 83%, 84%, 85%, 86%, 87%, 88%, 89%, 90%, 91%, 92%, 93%, 94%, 95%, 96%, 97%, 98%, or 99% sequence identity with any of the nucleic acid sequences of SEQ ID NO: 50, 52, 54, 56, 58, 60, 62, 64, 66, 68, 70, 72, 74, 76, 78, 80, 82, 84, 86, 88, 90, 92, 94, 96, 98, 100, 102, 104, 106, 108, 110, 112, 114, 116, 118, 120, 122, or 124, and further preferably conferring enhanced yield-related traits relative to control plants,
[0851] (v) a first nucleic acid molecule which hybridizes with a second nucleic acid molecule of (i) to (iv) under stringent hybridization conditions and preferably confers enhanced yield-related traits relative to control plants
[0852] (vi) a nucleic acid encoding said polypeptide having, in increasing order of preference, at least 50%, 51%, 52%, 53%, 54%, 55%, 56%, 57%, 58%, 59%, 60%, 61%, 62%, 63%, 64%, 65%, 66%, 67%, 68%, 69%, 70%, 71%, 72%, 73%, 74%, 75%, 76%, 77%, 78%, 79%, 80%, 81%, 82%, 83%, 84%, 85%, 86%, 87%, 88%, 89%, 90%, 91%, 92%, 93%, 94%, 95%, 96%, 97%, 98%, or 99% sequence identity to the amino acid sequence represented by (any one of) SEQ ID NO: 51, 53, 55, 57, 59, 61, 63, 65, 67, 69, 71, 73, 75, 77, 79, 81, 83, 85, 87, 89, 91, 93, 95, 97, 99, 101, 103, 105, 107, 109, 111, 113, 115, 117, 119, 121, 123, or 125 and preferably conferring enhanced yield-related traits relative to control plants; or
[0853] (vii) a nucleic acid comprising any combination(s) of features of (i) to (vi) above.
[0854] E. Method according to any item A to D, wherein said enhanced yield-related traits comprise increased yield, preferably seed yield and/or biomass relative to control plants.
[0855] F. Method according to any one of items A to E, wherein said enhanced yield-related traits are obtained under non-stress conditions.
[0856] G. Method according to any one of items A to E, wherein said enhanced yield-related traits are obtained under conditions of drought stress, salt stress or nitrogen deficiency.
[0857] H. Method according to any one of items A to G, wherein said nucleic acid is operably linked to a constitutive promoter, preferably to a GOS2 promoter, most preferably to a GOS2 promoter from rice.
[0858] I. Method according to any one of items A to H, wherein said nucleic acid molecule or said polypeptide, respectively, is of plant origin, preferably from a dicotyledonous plant, further preferably from the family Solanceae, more preferably from the genus Solanum, most preferably from Solanum lycopersicum.
[0859] J. Plant or part thereof, including seeds, obtainable by a method according to any one of items A to I, wherein said plant or part thereof comprises a recombinant nucleic acid encoding said polypeptide as defined in any one of items A to I.
[0860] K. Construct comprising:
[0861] (i) nucleic acid encoding said polypeptide as defined in any one of items A to H;
[0862] (ii) one or more control sequences capable of driving expression of the nucleic acid sequence of (a); and optionally
[0863] (iii) a transcription termination sequence.
[0864] L. Construct according to item K, wherein one of said control sequences is a constitutive promoter, preferably a GOS2 promoter, most preferably a GOS2 promoter from rice.
[0865] M. Use of a construct according to item K or L in a method for making plants having increased yield, particularly seed yield and/or biomass relative to control plants relative to control plants.
[0866] N. Plant, plant part or plant cell transformed with a construct according to item K or L or obtainable by a method according to any one of items A to I, wherein said plant or part thereof comprises a recombinant nucleic acid encoding said polypeptide as defined in any one of items A to J.
[0867] O. Method for the production of a transgenic plant having increased yield, particularly increased biomass and/or increased seed yield relative to control plants, comprising:
[0868] (i) introducing and expressing in a plant a nucleic acid encoding said polypeptide as defined in any one of items A to H; and
[0869] (ii) cultivating the plant cell under conditions promoting plant growth and development.
[0870] P. Plant having increased yield, particularly increased biomass and/or increased seed yield, relative to control plants, resulting from modulated expression of a nucleic acid encoding said polypeptide, or a transgenic plant cell originating from or being part of said transgenic plant.
[0871] Q. A method for the production of a product comprising the steps of growing the plants of the invention and producing said product from or by
   [0872] a. the plants of the invention; or
   [0873] b. parts, including seeds, of these plants.
[0874] R. Plant according to item J, N, or P, or a transgenic plant cell originating thereof, or a method according to item Q, wherein said plant is a crop plant, preferably a dicot such as sugar beet, alfalfa, trefoil, chicory, carrot, cassava, cotton, soybean, canola or a monocot, such as sugarcane, or a cereal, such as rice, maize, wheat, barley, millet, rye, triticale, sorghum emmer, spelt, secale, einkorn, teff, milo and oats.
[0875] S. Harvestable parts of a plant according to item J, wherein said harvestable parts are preferably shoot and/or root biomass and/or seeds.
[0876] T. Products produced from a plant according to item J and/or from harvestable parts of a plant according to item R.
[0877] U. Use of a nucleic acid encoding a polypeptide as defined in any one of items A to H in increasing yield, particularly seed yield and/or shoot biomass relative to control plants.
[0878] V. Construct according to item K or L comprised in a plant cell.
[0879] W. Recombinant chromosomal DNA comprising the construct according to item K or L.

### D-3. RTF (REM-Like Transcription Factor) Polypeptide—Items

[0880] The explanations and definitions given herein above in section C-3 apply mutatis mutandis to the following items (in D-3).

### Items D-3-1 to D-3-22

[0881] 1. A method for enhancing yield-related traits in plants relative to control plants, comprising modulating expression, preferably increasing expression, in a plant of a nucleic acid encoding a RTF (REM-like transcription factor) polypeptide, wherein said nucleic acid is selected from
   [0882] (i) a nucleic acid represented by any one of SEQ ID NO: 139, 141, 143, 145, 147, 149, 151, 153, 155, 157, 159, 161, or 163;
   [0883] (ii) the complement of a nucleic acid represented by any one of SEQ ID NO: 139, 141, 143, 145, 147, 149, 151, 153, 155, 157, 159, 161, or 163;
   [0884] (iii) a nucleic acid encoding the polypeptide as represented by any one of SEQ ID NO: 140, 142, 144, 146, 148, 150, 152, 154, 156, 158, 160, 162, or 164, preferably as a result of the degeneracy of the genetic code, said isolated nucleic acid can be deduced from a polypeptide sequence as represented by any one of SEQ ID NO: 140, 142, 144, 146, 148, 150, 152, 154, 156, 158, 160, 162, or 164;
   [0885] (iv) a nucleic acid having, in increasing order of preference at least 30%, 31%, 32%, 33%, 34%, 35%, 36%, 37%, 38%, 39%, 40%, 41%, 42%, 43%, 44%, 45%, 46%, 47%, 48%, 49%, 50%, 51%, 52%, 53%, 54%, 55%, 56%, 57%, 58%, 59%, 60%, 61%, 62%, 63%, 64%, 65%, 66%, 67%, 68%, 69%, 70%, 71%, 72%, 73%, 74%, 75%, 76%, 77%, 78%, 79%, 80%, 81%, 82%, 83%, 84%, 85%, 86%, 87%, 88%, 89%, 90%, 91%, 92%, 93%, 94%, 95%, 96%, 97%, 98%, or 99% sequence identity with any of the nucleic acid sequences of SEQ ID NO SEQ ID NO: 139, 141, 143, 145, 147, 149, 151, 153, 155, 157, 159, 161, or 163,
   [0886] (v) a nucleic acid which hybridizes with the nucleic acid molecule of (i) to (iv) under stringent hybridization conditions, and
   [0887] (vi) a nucleic acid encoding a polypeptide having, in increasing order of preference, at least 50%, 51%, 52%, 53%, 54%, 55%, 56%, 57%, 58%, 59%, 60%, 61%, 62%, 63%, 64%, 65%, 66%, 67%, 68%, 69%, 70%, 71%, 72%, 73%, 74%, 75%, 76%, 77%, 78%, 79%, 80%, 81%, 82%, 83%, 84%, 85%, 86%, 87%, 88%, 89%, 90%, 91%, 92%, 93%, 94%, 95%, 96%, 97%, 98%, or 99 sequence identity to the amino acid sequence represented by any one of SEQ ID NO: 140, 142, 144, 146, 148, 150, 152, 154, 156, 158, 160, 162, or 164.
[0888] 2. Method according to Item 1, wherein the RTF polypeptide comprises at least two B3 PFAM domains, in particular 4 B3 domains, having the PFAM accession number pfam02362.
[0889] 3. Method according to Item 1, wherein said modulated expression is effected by introducing and expressing in a plant said nucleic acid encoding said RTF polypeptide.
[0890] 4. Method according to any one of Items 1 to 3, wherein said enhanced yield-related traits comprise improved early vigour and increased yield, in particular increased biomass relative to control plants.
[0891] 5. Method according to any one of Items 1 to 3, wherein said enhanced yield-related traits are obtained under non-stress conditions, or wherein said enhanced yield-related traits are obtained under conditions of drought stress, salt stress or nitrogen deficiency.
[0892] 6. Method according to any of Items 1 to 5, wherein said RTF polypeptide comprises one or both of the following motifs:

| | | | |
|---|---|---|---|
| (i) | Motif 1-3: | PVAFF, | (SEQ ID NO: 165) |
| (ii) | Motif 2-3: | HDLRVGDIVVF. | (SEQ ID NO: 166) |

[0893] 7. Method according to any one of Items 1 to 6, wherein said nucleic acid encoding a RTF polypeptide is of plant origin, preferably from a dicotyledonous plant, further preferably from the family Brassicaceae, more preferably from the genus Arabidopsis, most preferably from Arabidopsis thaliana.
[0894] 8. Method according to any one of Items 1 to 7, wherein said nucleic acid encoding a RTF encodes any one of the polypeptides listed in Table A3 or is a portion of such a nucleic acid, or a nucleic acid capable of hybridising with a complementary sequence of such a nucleic acid.
[0895] 9. Method according to any one of Items 1 to 8, wherein said nucleic acid sequence encodes an orthologue or paralogue of any of the polypeptides given in Table A3.
[0896] 10. Method according to any one of Items 1 to 9, wherein said nucleic acid encodes the polypeptide represented by SEQ ID NO: 140.
[0897] 11. Method according to any one of Items 1 to 10, wherein said nucleic acid is operably linked to a constitutive promoter, preferably to a medium strength constitutive promoter, preferably to a plant promoter, more preferably to a GOS2 promoter, most preferably to a GOS2 promoter from rice.
[0898] 12. Plant, plant part thereof, including seeds, or plant cell, obtainable by a method according to any one of Items 1 to 11, wherein said plant, plant part or plant cell comprises a recombinant nucleic acid encoding a RTF polypeptide as defined in any of Items 1, 2 and 6 to 10.
[0899] 13. Construct comprising:
   [0900] (i) nucleic acid encoding a RTF as defined in any of Items 1, 2 and 6 to 10;
   [0901] (ii) one or more control sequences capable of driving expression of the nucleic acid sequence of (i); and optionally
   [0902] (i) a transcription termination sequence.
[0903] 14. Construct according to Item 12, wherein one of said control sequences is a constitutive promoter, preferably a medium strength constitutive promoter, preferably to a plant promoter, more preferably a GOS2 promoter, most preferably a GOS2 promoter from rice.
[0904] 15. Use of a construct according to Item 13 or 14 in a method for making plants having enhanced yield-related traits, preferably increased yield relative to control plants, and more preferably increased seed yield and/or increased biomass relative to control plants.
[0905] 16. Plant, plant part or plant cell transformed with a construct according to Item 13 or 14.
[0906] 17. Method for the production of a transgenic plant having enhanced yield-related traits relative to control plants, preferably increased yield relative to control plants, and more preferably increased seed yield and/or increased biomass relative to control plants, comprising:
   [0907] (i) introducing and expressing in a plant cell or plant a nucleic acid encoding a RTF polypeptide as defined in any of Items 1, 2 and 6 to 10; and
   [0908] (ii) cultivating said plant cell or plant under conditions promoting plant growth and development.
[0909] 18. Transgenic plant having enhanced yield-related traits relative to control plants, preferably increased yield relative to control plants, and more preferably increased seed yield and/or increased biomass, resulting from modulated expression of a nucleic acid encoding a RTF polypeptide as defined in any of Items 1, 2 and 6 to 10 or a transgenic plant cell derived from said transgenic plant.
[0910] 19. Transgenic plant according to Item 12, 16 or 18, or a transgenic plant cell derived therefrom, wherein said plant is a crop plant, such as beet, sugarbeet or alfalfa; or a monocotyledonous plant such as sugarcane; or a cereal, such as rice, maize, wheat, barley, millet, rye, triticale, sorghum, emmer, spelt, einkorn, teff, milo or oats.
[0911] 20. Harvestable parts of a plant according to Item 19, wherein said harvestable parts are preferably shoot biomass and/or seeds.
[0912] 21. Products derived from a plant according to Item 19 and/or from harvestable parts of a plant according to Item 20.
[0913] 22. Use of a nucleic acid encoding a RTF polypeptide as defined in any of Items 1, 2 and 6 to 10 for enhancing yield-related traits in plants relative to control plants, preferably for increasing yield, and more preferably for increasing seed yield and/or for increasing biomass in plants relative to control plants.

### Other Embodiments

### Item D-3-A to D-3-X:

[0914] A. A method for enhancing yield in plants relative to control plants, comprising modulating expression, preferably increasing expression, in a plant of a nucleic acid molecule encoding a RTF polypeptide, wherein said polypeptide comprises at least two, in particular three or four B3 domains, having the PFAM accession number pfam02362, and/or having the Interpro Accession number IPR003340, and/or wherein the RTF polypeptide comprises an IPR015300 domain (DNA-binding pseudobarrel domain).
[0915] B. Method according to item A, wherein said polypeptide comprises one or both of the following motifs:

| | | | |
|---|---|---|---|
| (i) | Motif 1-3: | PVAFF, | (SEQ ID NO: 165) |
| (ii) | Motif 2-3: | HDLRVGDIVVF. | (SEQ ID NO: 166) |

[0916] C. Method according to item A or B, wherein said modulated expression is effected by introducing and expressing in a plant a nucleic acid molecule encoding said RTF polypeptide.
[0917] D. Method according to any one of items A to C, wherein said polypeptide is encoded by a nucleic acid molecule comprising a nucleic acid molecule selected from the group consisting of:
[0918] (i) a nucleic acid represented by any one of SEQ ID NO: 139, 141, 143, 145, 147, 149, 151, 153, 155, 157, 159, 161, or 163;
[0919] (ii) the complement of a nucleic acid represented by any one of SEQ ID NO: 139, 141, 143, 145, 147, 149, 151, 153, 155, 157, 159, 161, or 163;
[0920] (iii) a nucleic acid encoding the polypeptide as represented by any one of SEQ ID NO: 140, 142, 144, 146, 148, 150, 152, 154, 156, 158, 160, 162, or 164, preferably as a resuit of the degeneracy of the genetic code, said isolated nucleic acid can be deduced from a polypeptide sequence as represented by any one of SEQ ID NO: 140, 142, 144, 146, 148, 150, 152, 154, 156, 158, 160, 162, or 164 and further preferably confers enhanced yield-related traits relative to control plants;
[0921] (iv) a nucleic acid having, in increasing order of preference at least 30%, 31%, 32%, 33%, 34%, 35%, 36%, 37%, 38%, 39%, 40%, 41%, 42%, 43%, 44%, 45%, 46%, 47%, 48%, 49%, 50%, 51%, 52%, 53%, 54%, 55%, 56%, 57%, 58%, 59%, 60%, 61%, 62%, 63%, 64%, 65%, 66%, 67%, 68%, 69%, 70%, 71%, 72%, 73%, 74%, 75%, 76%, 77%, 78%, 79%, 80%, 81%, 82%, 83%, 84%, 85%, 86%, 87%, 88%, 89%, 90%, 91%, 92%, 93%, 94%, 95%, 96%, 97%, 98%, or 99% sequence identity with any of the nucleic acid sequences of SEQ ID NO SEQ ID NO: 139, 141, 143, 145, 147, 149, 151, 153, 155, 157, 159, 161, or 163, and further preferably conferring enhanced yield-related traits relative to control plants,
[0922] (v) a first nucleic acid molecule which hybridizes with a second nucleic acid molecule of (i) to (iv) under stringent hybridization conditions and preferably confers enhanced yield-related traits relative to control plants;
[0923] (vi) a nucleic acid encoding said polypeptide having, in increasing order of preference, at least 50%, 51%, 52%, 53%, 54%, 55%, 56%, 57%, 58%, 59%, 60%, 61%, 62%, 63%, 64%, 65%, 66%, 67%, 68%, 69%, 70%, 71%, 72%, 73%, 74%, 75%, 76%, 77%, 78%, 79%, 80%, 81%, 82%, 83%, 84%, 85%, 86%, 87%, 88%, 89%, 90%, 91%, 92%, 93%, 94%, 95%, 96%, 97%, 98%, or 99% sequence identity to the amino acid sequence represented by any one of SEQ ID NO: 140, 142, 144, 146, 148, 150, 152, 154, 156, 158, 160, 162, or 164 and preferably conferring enhanced yield-related traits relative to control plants; or
[0924] (vii) a nucleic acid comprising any combination(s) of features of (i) to (vi) above.
[0925] E. Method according to any item A to D, wherein said enhanced yield-related traits comprise increased yield, preferably aboveground biomass or improved early vigour relative to control plants.
[0926] F. Method according to any one of items A to E, wherein said enhanced yield-related traits are obtained under non-stress conditions.
[0927] G. Method according to any one of items A to E, wherein said enhanced yield-related traits are obtained under conditions of drought stress, salt stress or nitrogen deficiency.
[0928] H. Method according to any one of items A to G, wherein said nucleic acid is operably linked to a constitutive promoter, preferably to a GOS2 promoter, most preferably to a GOS2 promoter from rice.
[0929] I. Method according to any one of items A to H, wherein said nucleic acid molecule or said polypeptide, respectively, is of plant origin, preferably from a dicotyledonous plant, further preferably from the family Brassicaceae, more preferably from the genus Arabidopsis, most preferably from Arabidopsis thaliana.
[0930] J. Plant or part thereof, including seeds, obtainable by a method according to any one of items A to I, wherein said plant or part thereof comprises a recombinant nucleic acid encoding said polypeptide as defined in any one of items A to I.
[0931] K. Construct comprising:
[0932] (i) nucleic acid encoding said polypeptide as defined in any one of items A to H;
[0933] (ii) one or more control sequences capable of driving expression of the nucleic acid sequence of (a); and optionally
[0934] (iii) a transcription termination sequence.
[0935] L. Construct according to item K, wherein one of said control sequences is a constitutive promoter, preferably a GOS2 promoter, most preferably a GOS2 promoter from rice.
[0936] M. Use of a construct according to item K or L in a method for making plants having increased yield, particularly seed yield and/or shoot biomass relative to control plants relative to control plants.
[0937] N. Plant, plant part or plant cell transformed with a construct according to item K or L or obtainable by a method according to any one of items A to I, wherein said plant or part thereof comprises a recombinant nucleic acid encoding said polypeptide as defined in any one of items A to J.
[0938] O. Method for the production of a transgenic plant having increased yield, particularly increased biomass and/or increased seed yield relative to control plants, comprising:
[0939] (i) introducing and expressing in a plant a nucleic acid encoding said polypeptide as defined in any one of items A to H; and
[0940] (ii) cultivating the plant cell under conditions promoting plant growth and development.
[0941] P. Plant having increased yield, particularly increased biomass and/or increased seed yield, relative to control plants, resulting from modulated expression of a nucleic acid encoding said polypeptide, or a transgenic plant cell originating from or being part of said transgenic plant.
[0942] Q. A method for the production of a product comprising the steps of growing the plants of the invention and producing said product from or by
   [0943] a. the plants of the invention; or
   [0944] b. parts, including seeds, of these plants.
[0945] R. Plant according to item J, N, or P, or a transgenic plant cell originating thereof, or a method according to item Q, wherein said plant is a crop plant, preferably a dicot such as sugar beet, alfalfa, trefoil, chicory, carrot, cassava, cotton, soybean, canola or a monocot, such as sugarcane, or a cereal, such as rice, maize, wheat, barley, millet, rye, triticale, sorghum emmer, spelt, secale, einkorn, teff, milo and oats.
[0946] S. Harvestable parts of a plant according to item J, wherein said harvestable parts are preferably shoot and/or root biomass and/or seeds.
[0947] T. Products produced from a plant according to item J and/or from harvestable parts of a plant according to item R.
[0948] U. Use of a nucleic acid encoding a polypeptide as defined in any one of items A to H in increasing yield, particularly seed yield and/or shoot biomass relative to control plants.
[0949] V. Construct according to item K or L comprised in a plant cell.
[0950] W. Recombinant chromosomal DNA comprising the construct according to item K or L.
[0951] X. Any of the preceding items A to U, wherein the nucleic acid encodes the RTF polypeptide or polynucleotide does not have a sequence as shown in
   [0952] SEQ ID NOs: 43550, 43565, 43576, 43568, 43548, 43575, 193877, 93871, 43560, 93863, 43562, 93879, 43570, 43558, 43578, 93869, 43556, 43572, and 93875 as disclosed in EP2090662A2,
   [0953] SEQ ID NOs: 312 and 2527 as disclosed in WO02/16655; and
   [0954] SEQ ID NO: 72 as disclosed in EP 2154956A2.

### D-4. BP1 (Bigger Plant 1) Polypeptide—Items

[0955] The explanations and definitions given herein above in section C-4 apply mutatis mutandis to the following items (in D-4).

### Items D-4-1 to D-4-24

[0956] 1. A method for enhancing yield-related traits in plants relative to control plants, comprising modulating expression, preferably increasing expression, in a plant of a nucleic acid encoding a BP1 polypeptide, wherein said BP1 polypeptide comprises the following motifs:

| | | |
|---|---|---|
| (i) | Motif 1-4: | (SEQ ID NO: 276) |
| | LNQ[DG]SXXND[EV]X[NS]DX[QP]G[HQ]X[GN]H[LP]EXXKX[DE][QE][VA][GE]VX | |
| | E[DE]X[MI][TA][AP]DV[KN]LS[VA]CRDTG[NE], | |
| (ii) | Motif 2-4: | (SEQ ID NO: 277) |
| | L[WR]RDYXD[LV][LV][QK][ED][TN]EXK[KR][KR]XLXSX[KN][RK][RT][KS]L[AV]LL | |
| | [AS]EVKFL[RQ][RK]K[YL]XSF[AKLP]K[GN][GDN]SQ[QK], | |
| | and | |
| (iii) | Motif 3-4: | (SEQ ID NO: 278) |
| | [DE][DG]KRX[VI][PS]WQD[RQ]XALK, | |

[0957] (iv) Or any of the motifs 4-4 to 9-4, preferably any one or more of motifs 4-4 to 6-4 as defined herein above.
[0958] 2. A method for enhancing yield-related traits in plants relative to control plants, comprising modulating expression, preferably increasing expression, in a plant of a nucleic acid encoding a BP1 polypeptide, wherein said BP1 polypeptide has, in an increasing order of preference, at least 60%, 61%, 62%, 63%, 64%, 65%, 66%, 67%, 68%, 69%, 70%, 71%, 72%, 73%, 74%, 75%, 76%, 77%, 78%, 79%, 80%, 81%, 82%, 83%, 84%, 85%, 86%, 87%, 88%, 89%, 90%, 91%, 92%, 93%, 94%, 95%, 96%, 97%, 98%, or 99% sequence identity to SEQ ID NO: 171.
[0959] 3. The method according to Item 2, wherein said BP1 polypeptide comprises one, two or three motifs of motifs 4-4, 5-4 and 6-4 as defined in Item 1.
[0960] 4. Method according to any one of Items 1 to 3, wherein said enhanced yield-related traits comprise increased yield relative to control plants, and preferably comprise increased biomass, increased shoot biomass, increased root biomass, increased NUE (nitrogen use efficiency) and/or increased seed yield relative to control plants.
[0961] 5. Method according to any one of Items 1 to 4, wherein said enhanced yield-related traits are obtained under non-stress conditions.
[0962] 6. Method according to any one of Items 1 to 4, wherein said enhanced yield-related traits are obtained under conditions of drought stress, salt stress or nitrogen deficiency.
[0963] 7. Method according to any one of Items 1 to 5, wherein said nucleic acid encoding a BP1 is of plant origin, preferably from a monocotyledonous plant, further preferably from the family Poaceae, more preferably from the genus Oryza, most preferably from Oryza sativa.
[0964] 8. Method according to any one of Items 1 to 7, wherein said nucleic acid encoding a BP1 polypeptide encodes any one of the polypeptides listed in Table A4, preferably, a polypeptide represented by SEQ ID NO: 171, 70, 74 or 98, or is a portion of such a nucleic acid, or a nucleic acid capable of hybridising with such a nucleic acid.
[0965] 9. Method according to any one of Items 1 to 8, wherein said nucleic acid sequence encodes an orthologue or paralogue of any of the polypeptides given in Table A4.
[0966] 10. Method according to any one of Items 1 to 9, wherein said nucleic acid encodes the polypeptide represented by SEQ ID NO: 171.
[0967] 11. Method according to any one of Items 1 to 10, wherein said nucleic acid is operably linked to a constitutive promoter, preferably to a medium strength constitutive promoter, preferably to a plant promoter, more preferably to a GOS2 promoter, most preferably to a GOS2 promoter from rice.
[0968] 12. Plant, plant part thereof, including seeds, or plant cell, obtainable by a method according to any one of Items 1 to 11, wherein said plant, plant part or plant cell comprises a recombinant nucleic acid encoding a BP1 polypeptide as defined in any of Items 1 to 3, and 7 to 10.
[0969] 13. Construct comprising:
   [0970] (i) nucleic acid encoding a BP1 as defined in any of Items 1 to 3 and 7 to 10;
   [0971] (ii) one or more control sequences capable of driving expression of the nucleic acid sequence of (i); and optionally
   [0972] (iii) a transcription termination sequence.
[0973] 14. Construct according to Item 13, wherein one of said control sequences is a constitutive promoter, preferably a medium strength constitutive promoter, preferably to a plant promoter, more preferably a GOS2 promoter, most preferably a GOS2 promoter from rice.
[0974] 15. Use of a construct according to Item 13 or 14 in a method for making plants having enhanced yield-related traits, preferably increased yield relative to control plants, and more preferably increased seed yield and/or increased biomass relative to control plants.
[0975] 16. Plant, plant part or plant cell transformed with a construct according to Item 13 or 14.
[0976] 17. Method for the production of a transgenic plant having enhanced yield-related traits relative to control plants, preferably increased yield relative to control plants, and more preferably increased seed yield and/or increased biomass relative to control plants, comprising:
   [0977] (i) introducing and expressing in a plant cell or plant a nucleic acid encoding a BP1 polypeptide as defined in any of Items 1 to 3 and 7 to 10; and
   [0978] (ii) cultivating said plant cell or plant under conditions promoting plant growth and development.
[0979] 18. Transgenic plant having enhanced yield-related traits relative to control plants, preferably increased yield relative to control plants, and more preferably increased seed yield and/or increased biomass, resulting from modulated expression of a nucleic acid encoding a BP1 polypeptide as defined in any of Items 1 to 3 and 7 to 10 or a transgenic plant cell originating from said transgenic plant and comprising a nucleic acid encoding a BP1 polypeptide as defined in any of Items 1 to 3 and 7 to 10.
[0980] 19. Transgenic plant according to Item 12, 16 or 18, or a transgenic plant cell originating therefrom and comprising a nucleic acid encoding a BP1 polypeptide as defined in any of Items 1 to 3 and 7 to 10, wherein said plant is a crop plant, such as beet, sugarbeet or alfalfa; or a monocotyledonous plant such as sugarcane; or a cereal, such as rice, maize, wheat, barley, millet, rye, triticale, sorghum, emmer, spelt, einkorn, teff, milo or oats.
[0981] 20. Harvestable parts of a plant according to Item 19, wherein said harvestable parts are preferably shoot biomass and/or seeds.
[0982] 21. Products produced from a plant according to Item 19 and/or from harvestable parts of a plant according to Item 20.
[0983] 22. Use of a nucleic acid encoding a polypeptide listed in Table A4 or a nucleic acid encoding a BP1 polypeptide as defined in any of Items 1 to 3 and 7 to 10 for enhancing yield-related traits in plants relative to control plants, preferably for increasing yield, and more preferably for increasing seed yield and/or for increasing biomass in plants relative to control plants.
[0984] 23. A method for the production of a product comprising the steps of growing the plants according to Item 12, 16 or 18 and producing said product from or by
   [0985] (i) said plants; or
   [0986] (ii) parts, including seeds, of said plants.
[0987] 24. Construct according to Item 13 or 14 comprised in a plant cell.

### Other Preferred Items

### Item D-4-A to D-4-X:

[0988] A. A method for enhancing yield in plants relative to control plants, comprising modulating expression, preferably increasing expression, in a plant of a nucleic acid molecule encoding a BP1 polypeptide, wherein said BP1 polypeptide comprises one or more of the following motifs:

| | | |
|---|---|---|
| (i) | Motif 1-4: | (SEQ ID NO: 276 or SEQ ID NO: 289) |
| | LNQ[DG]SXXND[EV]X[NS]DX[QP]G[HQ]X[GN]H[LP]EXXKX[DE][QE][VA][GE] | |
| | VXE[DE]X[MI][TA][AP]DV[KN]LS[VA]CRDTG[NE], | |
| (ii) | Motif 2-4: | (SEQ ID NO: 277 or SEQ ID NO: 290) |
| | L[WR]RDYXD[LV][LV][QK][ED][TN]EXK[KR][KR]XLXSX[KN][RK][KS]L[AV] | |
| | LL[AS]EVKFL[RQ][RK]K[YL]XSF[AKLP]K[GN][GDN]SQ[QK], | |
| | and | |
| (iii) | Motif 3-4: | (SEQ ID NO: 278 or SEQ ID NO: 291) |
| | [DE][DG]KRX[VI][PS]WQD[RQ]XALK | |

[0989] (iv) Or any of the motifs 4-4 to 9-4, preferably any one or more of motifs 4-4 to 6-4 as defined herein above.
[0990] B. A method for enhancing yield in plants relative to control plants, comprising modulating expression, preferably increasing expression, in a plant of a nucleic acid molecule encoding a BP1 polypeptide, wherein said BP1 polypeptide in increasing order of preference at least 30%, 31%, 32%, 33%, 34%, 35%, 36%, 37%, 38%, 39%, 40%, 41%, 42%, 43%, 44%, 45%, 46%, 47%, 48%, 49%, 50%, 51%, 52%, 53%, 54%, 55%, 56%, 57%, 58%, 59%, 60%, 61%, 62%, 63%, 64%, 65%, 66%, 67%, 68%, 69%, 70%, 71%, 72%, 73%, 74%, 75%, 76%, 77%, 78%, 79%, 80%, 81%, 82%, 83%, 84%, 85%, 86%, 87%, 88%, 89%, 90%, 91%, 92%, 93%, 94%, 95%, 96%, 97%, 98%, or 99% sequence identity to SEQ ID NO: 171, and wherein said BP1 polypeptide comprises one or more of the motifs as defined in item A.
[0991] C. Method according to item A or B, wherein said modulated expression is effected by introducing and expressing in a plant a nucleic acid molecule encoding a BP1 polypeptide.
[0992] D. Method according to any one of items A to C, wherein said polypeptide is encoded by a nucleic acid molecule comprising a nucleic acid molecule selected from the group consisting of:
   [0993] (i) a nucleic acid represented by any one of SEQ ID NO: 170, 172, 174, 176, 178, 180, 182, 184, 186, 188, 190, 192, 194, 196, 198, 200, 202, 204, 206, 208, 210, 212, 214, 216, 218, 220, 222, 224, 226, 228, 230, 232, 234, 236, 238, 240, 242, 244, 246, 248, 250, 252, 254, 256, 258, 260, 262, 264, 266, 268, 270, 272, or 274,
   [0994] (ii) the complement of a nucleic acid represented by any one of SEQ ID NO: 170, 172, 174, 176, 178, 180, 182, 184, 186, 188, 190, 192, 194, 196, 198, 200, 202, 204, 206, 208, 210, 212, 214, 216, 218, 220, 222, 224, 226, 228, 230, 232, 234, 236, 238, 240, 242, 244, 246, 248, 250, 252, 254, 256, 258, 260, 262, 264, 266, 268, 270, 272, or 274;
   [0995] (iii) (iii) a nucleic acid encoding the polypeptide as represented by any one of SEQ ID NO: 171, 173, 175, 177, 179, 181, 183, 185, 187, 189, 191, 193, 195, 197, 199, 201, 203, 205, 207, 209, 211, 213, 215, 217, 219, 221, 223, 225, 227, 229, 231, 233, 235, 237, 239, 241, 243, 245, 247, 249, 251, 253, 255, 257, 259, 261, 263, 265, 267, 269, 271, 273, or 275, preferably as a result of the degeneracy of the genetic code, said isolated nucleic acid can be deduced from a polypeptide sequence as represented by any one of SEQ ID NO: 171, 173, 175, 177, 179, 181, 183, 185, 187, 189, 191, 193, 195, 197, 199, 201, 203, 205, 207, 209, 211, 213, 215, 217, 219, 221, 223, 225, 227, 229, 231, 233, 235, 237, 239, 241, 243, 245, 247, 249, 251, 253, 255, 257, 259, 261, 263, 265, 267, 269, 271, 273, or 275 and further preferably confers enhanced yield-related traits relative to control plants;
   [0996] (iv) a nucleic acid having, in increasing order of preference at least 30%, 31%, 32%, 33%, 34%, 35%, 36%, 37%, 38%, 39%, 40%, 41%, 42%, 43%, 44%, 45%, 46%, 47%, 48%, 49%, 50%, 51%, 52%, 53%, 54%, 55%, 56%, 57%, 58%, 59%, 60%, 61%, 62%, 63%, 64%, 65%, 66%, 67%, 68%, 69%, 70%, 71%, 72%, 73%, 74%, 75%, 76%, 77%, 78%, 79%, 80%, 81%, 82%, 83%, 84%, 85%, 86%, 87%, 88%, 89%, 90%, 91%, 92%, 93%, 94%, 95%, 96%, 97%, 98%, or 99% sequence identity with any of the nucleic acid sequences of SEQ ID NO: 170, 172, 174, 176, 178, 180, 182, 184, 186, 188, 190, 192, 194, 196, 198, 200, 202, 204, 206, 208, 210, 212, 214, 216, 218, 220, 222, 224, 226, 228, 230, 232, 234, 236, 238, 240, 242, 244, 246, 248, 250, 252, 254, 256, 258, 260, 262, 264, 266, 268, 270, 272, or 274,
   [0997] (v) a first nucleic acid molecule which hybridizes with a second nucleic acid molecule of (i) to (iv) under stringent hybridization conditions and preferably confers enhanced yield-related traits relative to control plants,
   [0998] (vi) a nucleic acid encoding said polypeptide having, in increasing order of preference, at least 50%, 51%, 52%, 53%, 54%, 55%, 56%, 57%, 58%, 59%, 60%, 61%, 62%, 63%, 64%, 65%, 66%, 67%, 68%, 69%, 70%, 71%, 72%, 73%, 74%, 75%, 76%, 77%, 78%, 79%, 80%, 81%, 82%, 83%, 84%, 85%, 86%, 87%, 88%, 89%, 90%, 91%, 92%, 93%, 94%, 95%, 96%, 97%, 98%, or 99% sequence identity to the amino acid sequence represented by any one of SEQ ID NO: 171, 173, 175, 177, 179, 181, 183, 185, 187, 189, 191, 193, 195, 197, 199, 201, 203, 205, 207, 209, 211, 213, 215, 217, 219, 221, 223, 225, 227, 229, 231, 233, 235, 237, 239, 241, 243, 245, 247, 249, 251, 253, 255, 257, 259, 261, 263, 265, 267, 269, 271, 273, or 275, and preferably conferring enhanced yield-related traits relative to control plants; or
   [0999] (vii) a nucleic acid comprising any combination(s) of features of (i) to (vi) above.
[1000] E. Method according to any item A to D, wherein said enhanced yield-related traits comprise increased yield, preferably seed yield, root biomass, aboveground biomass and/or shoot biomass relative to control plants.
[1001] F. Method according to any one of items A to E, wherein said enhanced yield-related traits are obtained under non-stress conditions.
[1002] G. Method according to any one of items A to E, wherein said enhanced yield-related traits are obtained under conditions of drought stress, salt stress or, more preferably, unter nitrogen deficiency.
[1003] H. Method according to any one of items A to G, wherein said nucleic acid is operably linked to a constitutive promoter, preferably to a GOS2 promoter, most preferably to a GOS2 promoter from rice.
[1004] I. Method according to any one of items A to H, wherein said nucleic acid molecule or said polypeptide, respectively, is of plant origin, preferably from a monocotyledonous plant, further preferably from the family Poaceae, more preferably from the genus Oryza, most preferably from Oryza sativa.
[1005] J. Plant or part thereof, including seeds, obtainable by a method according to any one of items A to I, wherein said plant or part thereof comprises a recombinant nucleic acid encoding said polypeptide as defined in any one of items A to I.
[1006] K. Construct comprising:
   [1007] (i) nucleic acid encoding said polypeptide as defined in any one of items A to H;
   [1008] (ii) one or more control sequences capable of driving expression of the nucleic acid sequence of (a); and optionally
   [1009] (iii) a transcription termination sequence.
[1010] L. Construct according to item K, wherein one of said control sequences is a constitutive promoter, preferably a GOS2 promoter, most preferably a GOS2 promoter from rice.
[1011] M. Use of a construct according to item K or L in a method for making plants having increased yield, particularly seed yield and/or shoot biomass relative to control plants relative to control plants.
[1012] N. Plant, plant part or plant cell transformed with a construct according to item K or L or obtainable by a method according to any one of items A to H, wherein said plant or part thereof comprises a recombinant nucleic acid encoding said polypeptide as defined in any one of items A to J.
[1013] O. Method for the production of a transgenic plant having increased yield, particularly increased biomass and/or increased seed yield relative to control plants, comprising:
   [1014] (i) introducing and expressing in a plant a nucleic acid encoding said polypeptide as defined in any one of items A to H; and
   [1015] (ii) cultivating the plant cell under conditions promoting plant growth and development.
[1016] P. Plant having increased yield, particularly increased biomass and/or increased seed yield, relative to control plants, resulting from modulated expression of a nucleic acid encoding a BP1 polypeptide, or a transgenic plant cell originating from or being part of said transgenic plant.
[1017] Q. A method for the production of a product comprising the steps of growing the plants of the invention and producing said product from or by
   [1018] a. the plants of the invention; or
   [1019] b. parts, including seeds, of these plants.
[1020] R. Plant according to item J, N, or P, or a transgenic plant cell originating thereof, or a method according to item Q, wherein said plant is a crop plant, preferably a dicot, preferably sugar beet, alfalfa, trefoil, chicory, carrot, cassava, cotton, soybean, canola or a monocot, preferably, sugarcane, or a cereal, such as rice, maize, wheat, barley, millet, rye, triticale, sorghum emmer, spelt, secale, einkorn, teff, milo and oats.
[1021] S. Harvestable parts of a plant according to item J, wherein said harvestable parts are preferably shoot and/or root biomass and/or seeds.
[1022] T. Products produced from a plant according to item J and/or from harvestable parts of a plant according to item R.
[1023] U. Use of a nucleic acid encoding a polypeptide as defined in any one of items A to H in increasing yield, preferably seed yield, root biomass, aboveground biomass and/or shoot biomass relative to control plants.
[1024] V. Construct according to item K or L comprised in a plant cell.
[1025] W. Recombinant chromosomal DNA comprising the construct according to item K or L.

### DESCRIPTION OF FIGURES

[1026] The present invention will now be described with reference to the following figures in which:

[1027] FIG. 1 represents the domain structure of SEQ ID NO: 2 with conserved domains and motifs. The conserved domains are indicated in bold. PF06200 is located in the central part, PF09425 is located in the C-terminal part of the protein. The motifs 1 to 6 are indicated with dashed lines (arabic numbers). Motifs 1 to 6 as indicated in FIG. 1 correspond to motifs 1-1 to 6-1 as set forth in section C-1.

[1028] FIG. 2 represents a multiple alignment of various TLP polypeptides. The asterisks indicate identical amino acids among the various protein sequences, colons represent highly conserved amino acid substitutions, and the dots represent less conserved amino acid substitution; on other positions there is no sequence conservation. These alignments can be used for defining further motifs or signature sequences, when using conserved amino acids. For the alignments, the sequences of the TLP polypeptides from Solanum lycopersicum UNK LLR (SEQ ID NO: 2), Arabidopsis thaliana_AT3G17860.1 (SEQ ID NO: 4), Brassica napus (SEQ ID NO: 6), Glycine max (SEQ ID NO: 8), Glycine max (SEQ ID NO: 10), Glycine max (SEQ ID NO: 12), Hordeum vulgare (SEQ ID NO: 14), Medicago truncatula (SEQ ID NO: 16), Medicago truncatula (SEQ ID NO: 18), Populus trichocarpa (SEQ ID NO: 20), Populus trichocarpa (SEQ ID NO: 22), Populus trichocarpa (SEQ ID NO: 24), Populus trichocarpa (SEQ ID NO: 26), Solanum lycopersicum (SEQ ID NO: 28), Triticum aestivum (SEQ ID NO: 30), Oryza sativa (SEQ ID NO: 32), Zea mays (SEQ ID NO: 34).

[1029] FIG. 3 shows phylogenetic tree of TLP polypeptides. The phylogenetic tree was constructed by aligning PMP22 sequences using MAFFT (Katoh and Toh (2008)—Briefings in Bioinformatics 9:286-298). A neighbour-joining tree was calculated using Quick-Tree (Howe et al. (2002), Bioinformatics 18(11): 1546-7), 100 bootstrap repetitions.

[1030] FIG. 4 shows the MATGAT table of Example III-1.

[1031] FIG. 5 represents the binary vector used for increased expression in Oryza sativa of a TLP-encoding nucleic acid under the control of a rice GOS2 promoter (pGOS2).

[1032] FIG. 6 represents the domain structure of SEQ ID NO: 51 with conserved domains and motifs. The conserved Pfam domain PF04117 is indicated in bold. The motifs 1 to 9 are indicated with dashed lines (arabic numbers). Motifs 1 to 9 as indicated in FIG. 6 correspond to motifs 1-2 to 9-2 as set forth in section C-2.

[1033] FIG. 7 represents a multiple alignment of various PMP22 polypeptides. The asterisks indicate identical amino acids among the various protein sequences, colons represent highly conserved amino acid substitutions, and the dots represent less conserved amino acid substitution; on other positions there is no sequence conservation. These alignments can be used for defining further motifs or signature sequences, when using conserved amino acids. FIG. 7A shows an alignment of polypeptides comprised by cluster A. FIG. 7B shows an alignment of polypeptides comprised by clusters A and B. FIG. 7C shows an alignment of polypeptides comprised by clusters A, B and C (for the Clusters, see phylogenetic tree in FIG. 8). For the alignments, the sequences of the PMP polypeptides from Lycopersicon esculentum L450 PMP22 (SEQ ID NO: 51), Arabidopsis lyrata (SEQ ID NO: 53), Arabidopsis thaliana AT1G52870.2 (SEQ ID NO: 55), Brassica napus BN06MC04723 42271568 (SEQ ID NO: 57), Ipomoea nil (SEQ ID NO: 59), Nicotiana benthamiana (SEQ ID NO: 61), Nicotiana tabacum (SEQ ID NO: 63), Solanum tuberosum (SEQ ID NO:65), Arabidopsis lyrata (SEQ ID NO: 67), Arabidopsis thaliana (SEQ ID NO: 69), Glycine max (SEQ ID NO: 71), Glycine max (SEQ ID NO: 73), Glycine max (SEQ ID NO: 75), Helianthus annuus (SEQ ID NO: 77), Helianthus paradoxus (SEQ ID NO: 79), Malus domestica (SEQ ID NO: 81), Oryza sativa (SEQ ID NO: 83), Physcomitrella patens (SEQ ID NO: 85), Panicum virgatum (SEQ ID NO: 87), Sorghum bicolor (SEQ ID NO: 89), Zea mays ZM07MC32543 BFb0296A02@32446 (SEQ ID NO: 91), Zea mays (SEQ ID NO: 93), Triphysaria sp (SEQ ID NO: 95), Vitis vinifera (SEQ ID NO: 97), Aquilegia sp (SEQ ID NO: 99), Glycine max (SEQ ID NO: 101), Glycine max (SEQ ID NO: 103), Glycine max GM06MC03382 49802960@3354 (SEQ ID NO: 105), Gossypium raimondii (SEQ ID NO: 107), Helianthus argophyllus (SEQ ID NO: 109), Lactuca sativa (SEQ ID NO: 111), Prunus persica (SEQ ID NO: 113), Poncirus trifoliata (SEQ ID NO: 115), Phaseolus vulgaris (SEQ ID NO: 117), Theobroma cacao (SEQ ID NO: 119), Vitis vinifera (SEQ ID NO: 121), Cichorium intybus (SEQ ID NO: 123), Gossypium hirsutum (SEQ ID NO: 125). For the full name of the proteins, see Table A2.

[1034] FIG. 8 shows phylogenetic tree of PMP22 polypeptides. The phylogenetic tree was constructed by aligning PMP22 sequences using MAFFT (Katoh and Toh (2008)—Briefings in Bioinformatics 9:286-298). A neighbour-joining tree was calculated using Quick-Tree (Howe et al. (2002), Bioinformatics 18(11): 1546-7), 100 bootstrap repetitions.

[1035] FIG. 9 shows the MATGAT table of Example III-2.

[1036] FIG. 10-2 represents the binary vector used for increased expression in Oryza sativa of a PMP22-encoding nucleic acid under the control of a rice GOS2 promoter (pGOS2).

[1037] FIG. 11 represents the domain structure of SEQ ID NO: 140 with conserved motifs 1 and 2. The four B3 domains are shown in bold. Motifs 1 and 2 as indicated in FIG. 11 correspond to motifs 1-3 and 2-3 as set forth in section C-3.

[1038] FIG. 12 represents a multiple alignment of various RTF polypeptides. The asterisks indicate identical amino acids among the various protein sequences, colons represent highly conserved amino acid substitutions, and the dots represent less conserved amino acid substitution; on other positions there is no sequence conservation. These alignments can be used for defining further motifs or signature sequences, when using conserved amino acids. The aligned polypeptide sequences are as follows: Arabidopsis thaliana_AT2G24700.1#1, SEQ ID NO: 140; Arabidopsis thaliana_AT4G00260.1#1, SEQ ID NO: 142; Arabidopsis thaliana_AT2G24650.1#1, SEQ ID NO: 144; Arabidopsis thaliana_AT2G24650.2#1, SEQ ID NO: 146; Arabidopsis thaliana_AT1G26680.1#1, SEQ ID NO: 148; Brassica napus_CD826203#1, SEQ ID NO: 150; Brassica napus_TC73539#1, SEQ ID NO: 152; Solanum lycopersicum_TC201533#1, SEQ ID NO:154; Arabidopsis thaliana_At4g31680, SEQ ID NO: 156; Arabidopsis thaliana_At4g31640, SEQ ID NO: 158; Arabidopsis thaliana_At4g31660, SEQ ID NO: 160; Arabidopsis thaliana_At4g31650, SEQ ID NO: 162; Arabidopsis thaliana_At4g31690, SEQ ID NO: 164.

[1039] FIG. 13 shows phylogenetic tree of RTF polypeptides (see Examples).

[1040] FIG. 14 shows the MATGAT table of Example III-3.

[1041] FIG. 15 represents the binary vector used for increased expression in Oryza sativa of a RTF-encoding nucleic acid under the control of a rice GOS2 promoter (pGOS2).

[1042] FIG. 16 represents the domain structure of SEQ ID NO: 171 with conserved motifs 1 to 6. The location of the motifs is indicated with dashed lines, arabic number “1” represents motifs 1 and 4, “2” the location of motifs 2 and 5 and “3” the location of motifs 3 and 6. Motifs 1 to 6 as indicated in FIG. 16 correspond to motifs 1-4 to 6-4 as set forth in section C-4.

[1043] FIG. 17 represents a multiple alignment of various BP1 polypeptides. The asterisks indicate identical amino acids among the various protein sequences, colons represent highly conserved amino acid substitutions, and the dots represent less conserved amino acid substitution; on other positions there is no sequence conservation. These alignments can be used for defining further motifs or signature sequences, when using conserved amino acids. The aligned sequences are the following (SEQ ID NOs are given in brackets): Oryza sativa LOC Os09g25410 (SEQ ID NO: 171); Arabidopis lyrata 944925 (SEQ ID NO: 173); Arabidpsis thaliana AT4G30630 (SEQ ID NO: 175); Brassica napus TC91202 (SEQ ID NO: 177); Capsicum annuum TC15926 (SEQ ID NO: 179); Cichorium intybus TA970 13427 (SEQ ID NO: 181); Centaurea maculosa TA1609 215693 (SEQ ID NO: 183); Centaurea maculosa TA3603 215693 (SEQ ID NO: 185); Carthamus tinctorius TA4044 4222 (SEQ ID NO: 187); Euphorbia esula TC2982 (SEQ ID NO: 189); Fragaria vesca TA11867 57918 (SEQ ID NO: 191); Gossypium hirsutum TC136942 (SEQ ID NO: 193); Glycine max Glyma02g36620 (SEQ ID NO: 195); Glycine max Glyma17g08070 (SEQ ID NO: 197); Helianthus annuus TC40508 (SEQ ID NO: 199); Helianthus argophyllus TA3915 73275 (SEQ ID NO: 201); Helianthus tuberosus EL464130 (SEQ ID NO: 203); Hordeum vulgare TC185682 (SEQ ID NO: 205); Lotus japonicus TC37963 (SEQ ID NO: 207); Lactuca saligna TA2168 75948 (SEQ ID NO: 4209); Lactuca sativa DW131501 (SEQ ID NO: 211); Lactuca sativa TC20185 (SEQ ID NO: 213); Lactuca serriola BU011148 (SEQ ID NO: 215); Lactuca virosa TA2198 75947 (SEQ ID NO: 217); Mesembryanthemum crystallinum TC9929 (SEQ ID NO: 219); Medicago truncatula AC150446 9.5 (SEQ ID NO: 221); Oryza sativa LOC Os08g16930 (SEQ ID NO: 223); Passiflora edulis FP092509 (SEQ ID NO: 225); Picea glauca BT104710 (SEQ ID NO: 227); Picea sitchensis TA13795 3332 (SEQ ID NO: 229); Pinus taeda TA10646 3352 (SEQ ID NO: 231); Populus trichocarpa 578729 (SEQ ID NO: 233); Populus trichocarpa scaff VI.1304 (SEQ ID NO: 235); Panicum virgatum TC29094 (SEQ ID NO: 237); Panicum virgatum TC30704 (SEQ ID NO: 239); Phaseolus vulgaris TC10046 (SEQ ID NO: 241); Sorghum bicolor Sb02g024920 (SEQ ID NO: 243); Sorghum bicolor Sb07g011060 (SEQ ID NO: 245); Solanum chacoense TA1669 4108 (SEQ ID NO: 247); Saruma henryi DT604565 (SEQ ID NO: 249); Solanum lycopersicum TC195266 (SEQ ID NO: 251); Solanum lycopersicum TC206342 (SEQ ID NO: 253); Solanum tuberosum AM908388 (SEQ ID NO: 255); Solanum tuberosum NP13064295 (SEQ ID NO: 257); Solanum lycopersicum 16878 (SEQ ID NO: 259); Theobroma cacao TC4923 (SEQ ID NO: 261); Tagetes erecta 417 (SEQ ID NO:263); Zea mays GRMZM2G075851 T01 (SEQ ID NO: 265); Zea mays GRMZM2G093731 T02 (SEQ ID NO: 267); Zea mays GRMZM2G371316 T01 (SEQ ID NO: 269); Zingiber officinale TA4076 94328 (SEQ ID NO: 271); Zingiber officinale TA6335 94328 (SEQ ID NO: 273); Zingiber officinale TA6947 94328 (SEQ ID NO: 275).

[1044] FIG. 18 shows phylogenetic tree of BP1 polypeptides. A phylogenetic tree of BP1 polypeptides was constructed by aligning BP1 sequences using MAFFT (Katoh and Toh (2008)—Briefings in Bioinformatics 9:286-298). A neighbour-joining tree was calculated using Quick-Tree (Howe et al. (2002), Bioinformatics 18(11): 1546-7), 100 bootstrap repetitions. The circular dendrogram (FIG. 18) was drawn using Dendroscope (Huson et al. (2007), BMC Bioinformatics 8(1):460). Confidence levels for 100 bootstrap repetitions are indicated for major branchings.

[1045] FIG. 19 represents the binary vector used for increased expression in Oryza sativa of a BP1-encoding nucleic acid under the control of a rice GOS2 promoter (pGOS2).

[1046] FIG. 20 shows the MATGAT table of Example 111-4.

### EXAMPLES

[1047] The present invention will now be described with reference to the following examples, which are by way of illustration only. The following examples are not intended to limit the scope of the invention

[1048] DNA manipulation: unless otherwise stated, recombinant DNA techniques are performed according to standard protocols described in (Sambrook (2001) Molecular Cloning: a laboratory manual, 3rd Edition Cold Spring Harbor Laboratory Press, CSH, New York) or in Volumes 1 and 2 of Ausubel et al. (1994), Current Protocols in Molecular Biology, Current Protocols. Standard materials and methods for plant molecular work are described in Plant Molecular Biology Labfax (1993) by R. D. D. Croy, published by BIOS Scientific Publications Ltd (UK) and Blackwell Scientific Publications (UK).

### Example I

### I-1. TLP (Tify Like Protein) Polypeptide

[1049] Identification of sequences related to SEQ ID NO: 1 and SEQ ID NO: 2 Sequences (full length cDNA, ESTs or genomic) related to SEQ ID NO: 1 and SEQ ID NO: 2 were identified amongst those maintained in the Entrez Nucleotides database at the National Center for Biotechnology Information (NCBI) using database sequence search tools, such as the Basic Local Alignment Tool (BLAST) (Altschul et al. (1990) J. Mol. Biol. 215:403-410; and Altschul et al. (1997) Nucleic Acids Res. 25:3389-3402). The program is used to find regions of local similarity between sequences by comparing nucleic acid or polypeptide sequences to sequence databases and by calculating the statistical significance of matches. For example, the polypeptide encoded by the nucleic acid of SEQ ID NO: 1 was used for the TBLASTN algorithm, with default settings and the filter to ignore low complexity sequences set off. The output of the analysis was viewed by pairwise comparison, and ranked according to the probability score (E-value), where the score reflect the probability that a particular alignment occurs by chance (the lower the E-value, the more significant the hit). In addition to E-values, comparisons were also scored by percentage identity. Percentage identity refers to the number of identical nucleotides (or amino acids) between the two compared nucleic acid (or polypeptide) sequences over a particular length. In some instances, the default parameters may be adjusted to modify the stringency of the search. For example the E-value may be increased to show less stringent matches. This way, short nearly exact matches may be identified.

[1050] Table A1 provides a list of nucleic acid sequences related to SEQ ID NO: 1 and SEQ ID NO: 2.

TABLE A1
Examples of TLP nucleic acids and polypeptides:

| | Nucleic acid | Protein |
|---|---|---|
| Plant Source | SEQ ID NO: | SEQ ID NO: |
| Solanum lycopersicum_UNK LLR | 1 | 2 |
| Arabidopsis thaliana_AT3G17860.1 | 3 | 4 |
| Brassica napus_TC100484 | 5 | 6 |
| Glycine max_Glyma05g34960.1 | 7 | 8 |
| Glycine max_Glyma08g04770.1 | 9 | 10 |
| Glycine max_Glyma09g30460.1 | 11 | 12 |
| Hordeum_vulgare_subsp_vulgare_AK250045 | 13 | 14 |
| Medicago truncatula_TC118189 | 15 | 16 |
| Medicago truncatula_TC119816 | 17 | 18 |
| Populus trichocarpa_scaff_VIII.1248 | 19 | 20 |
| Populus trichocarpa_scaff_X.1014 | 21 | 22 |
| Populus trichocarpa_scaff_XV.429 | 23 | 24 |
| Populus trichocarpa_TC117359 | 25 | 26 |
| Solanum lycopersicum_TC207683 | 27 | 28 |
| Triticum aestivum_TC290287 | 29 | 30 |
| Oryza sativa_LOC_Os08g33160.1 | 31 | 32 |
| Zea_mays_GRMZM2G126507_T01 | 33 | 34 |

[1051] Sequences have been tentatively assembled and publicly disclosed by research institutions, such as The Institute for Genomic Research (TIGR; beginning with TA). For instance, the Eukaryotic Gene Orthologs (EGO) database may be used to identify such related sequences, either by keyword search or by using the BLAST algorithm with the nucleic acid sequence or polypeptide sequence of interest. Special nucleic acid sequence databases have been created for particular organisms, e.g. for certain prokaryotic organisms, such as by the Joint Genome Institute. Furthermore, access to proprietary databases, has allowed the identification of novel nucleic acid and polypeptide sequences.

### I-2. PMP22 Polypeptide (22 kDa Peroxisomal Membrane Like Polypeptide)

[1052] Sequences (full length cDNA, ESTs or genomic) related to SEQ ID NO: 50 and SEQ ID NO: 51 were identified as described herein above under I-1.

[1053] Table A2 provides a list of nucleic acid sequences related to SEQ ID NO: 50 and SEQ ID NO: 51.

TABLE A2
Examples of PMP22 nucleic acids and polypeptides:

| | Nucleic acid | Protein |
|---|---|---|
| Plant Source | SEQ ID NO: | SEQ ID NO: |
| Lycopersicon esculentum L450 PMP22 | 50 | 51 |
| Arabidopsis lyrata 474411 | 52 | 53 |
| Arabidopsis thaliana AT1G52870.2 | 54 | 55 |
| Brassica napus BN06MC04723 42271568 | 56 | 57 |
| Ipomoea nil TC25 | 58 | 59 |
| Nicotiana benthamiana TC11792 | 60 | 61 |
| Nicotiana tabacum TC57360 | 62 | 63 |
| Solanum tuberosum TC167881 | 64 | 65 |
| Arabidopsis lyrata 490222 | 66 | 67 |
| Arabidopsis thaliana AT4G03410.1 | 68 | 69 |
| Glycine max Glyma12g32920.1 | 70 | 71 |
| Glycine max Glyma13g37540.1 | 72 | 73 |
| Glycine max TC302765 | 74 | 75 |
| Helianthus annuus TC45682 | 76 | 77 |
| Helianthus paradoxus TA2132 73304 | 78 | 79 |
| Malus domestica TC51384 | 80 | 81 |
| Oryza sativa LOC Os03g38730.1 | 82 | 83 |
| Physcomitrella patens TC32628 | 84 | 85 |
| Panicum virgatum TC39638 | 86 | 87 |
| Sorghum bicolor Sb01g015680.1 | 88 | 89 |
| Zea mays ZM07MC32543 BFb0296A02@32446 | 90 | 91 |
| Zea mays GRMZM2G011269 T01 | 92 | 93 |
| Triphysaria sp TC3527 | 94 | 95 |
| Vitis vinifera GSVIVT00025998001 | 96 | 97 |
| Aquilegia sp TC27124 | 98 | 99 |
| Glycine max Glyma12g34950.1 | 100 | 101 |
| Glycine max Glyma13g35620.1 | 102 | 103 |
| Glycine max GM06MC03382 49802960@3354 | 104 | 105 |
| Gossypium raimondii TC2516 | 106 | 107 |
| Helianthus argophyllus TA2174 73275 | 108 | 109 |
| Lactuca sativa TC17162 | 110 | 111 |
| Prunus persica TC12602 | 112 | 113 |
| Poncirus trifoliata TA5129 37690 | 114 | 115 |
| Phaseolus vulgaris TC9799 | 116 | 117 |
| Theobroma cacao TC9688 | 118 | 119 |
| Vitis vinifera GSVIVT00027620001 | 120 | 121 |
| Cichorium intybus TA545 13427 | 122 | 123 |
| Gossypium hirsutum TC165523 | 124 | 125 |

### I-3. RTF (REM-Like Transcription Factor) Polypeptide

[1054] Sequences (full length cDNA, ESTs or genomic) related to SEQ ID NO: 139 and SEQ ID NO: 140 were identified as described herein above under I-1.

[1055] Table A3 provides a list of nucleic acid sequences related to SEQ ID NO: 139 and SEQ ID NO: 140.

TABLE A3
Examples of RTF nucleic acids and polypeptides:

| | Nucleic acid | Protein |
|---|---|---|
| Plant Source | SEQ ID NO: | SEQ ID NO: |
| Arabidopsis thaliana AT2G24700.1#1 | 139 | 140 |
| Arabidopsis thaliana AT4G00260.1#1 | 141 | 142 |
| Arabidopsis thaliana AT2G24650.1#1 | 143 | 144 |
| Arabidopsis thaliana AT2G24650.2#1 | 145 | 146 |
| Arabidopsis thaliana_AT1G26680.1#1 | 147 | 148 |
| Brassica napus_CD826203#1 | 149 | 150 |
| Brassica napus_TC73539#1 | 151 | 152 |
| Solanum lycopersicum_TC201533#1 | 153 | 154 |
| Arabidopsis thaliana_ At4g31680 | 155 | 156 |
| Arabidopsis thaliana_At4g31640 | 157 | 158 |
| Arabidopsis thaliana_At4g31660 | 159 | 160 |
| Arabidopsis thaliana_At4g31650 | 161 | 162 |
| Arabidopsis thaliana_At4g31690 | 163 | 164 |

### I-4. BP1 (Bigger Plant 1) Polypeptide

[1056] Sequences (full length cDNA, ESTs or genomic) related to SEQ ID NO: 170 and SEQ ID NO: 171 were identified as described herein above under I-1.

[1057] Table A4 provides a list of nucleic acid sequences related to SEQ ID NO: 170 and SEQ ID NO: 171.

TABLE A4
Examples of BP1 nucleic acids and polypeptides
and other related sequences

| | Nucleic acid | Protein |
|---|---|---|
| Plant Source | SEQ ID NO: | SEQ ID NO: |
| Oryza sativa Os09g25410 | 170 | 171 |
| Arabidopis lyrata 944925 | 172 | 173 |
| Arabidpsis thaliana AT4G30630 | 174 | 175 |
| Brassica napus TC91202 | 176 | 177 |
| Capsicum annuum TC15926 | 178 | 179 |
| Cichorium intybus TA970 13427 | 180 | 181 |
| Centaurea maculosa TA1609 | 182 | 183 |
| 215693 | | |
| Centaurea maculosa TA3603 | 184 | 185 |
| 215693 | | |
| Carthamus tinctorius TA4044 4222 | 186 | 187 |
| Euphorbia esula TC2982 | 188 | 189 |
| Fragaria vesca TA11867 57918 | 190 | 191 |
| Gossypium hirsutum TC136942 | 192 | 193 |
| Glycine max Glyma02g36620 | 194 | 195 |
| Glycine max Glyma17g08070 | 196 | 197 |
| Helianthus annuus TC40508 | 198 | 199 |
| Helianthus argophyllus TA3915 | 200 | 201 |
| 73275 | | |
| Helianthus tuberosus EL464130 | 202 | 203 |
| Hordeum vulgare TC185682 | 204 | 205 |
| Lotus japonicus TC37963 | 206 | 207 |
| Lactuca saligna TA2168 75948 | 208 | 209 |
| Lactuca sativa DW131501 | 210 | 211 |
| Lactuca sativa TC20185 | 212 | 213 |
| Lactuca serriola BU011148 | 214 | 215 |
| Lactuca virosa TA2198 75947 | 216 | 217 |
| Mesembryanthemum crystallinum | 218 | 219 |
| TC9929 | | |
| Medicago truncatula AC150446 | 220 | 221 |
| 9.5 | | |
| Oryza sativa LOC Os08g16930 | 222 | 223 |
| Passiflora edulis FP092509 | 224 | 225 |
| Picea glauca BT104710 | 226 | 227 |
| Picea sitchensis TA13795 3332 | 228 | 229 |
| Pinus taeda TA10646 3352 | 230 | 231 |
| Populus trichocarpa 578729 | 232 | 233 |
| Populus trichocarpa scaff VI.1304 | 234 | 235 |
| Panicum virgatum TC29094 | 236 | 237 |
| Panicum virgatum TC30704 | 238 | 239 |
| Phaseolus vulgaris TC10046 | 240 | 241 |
| Sorghum bicolor Sb02g024920 | 242 | 243 |
| Sorghum bicolor Sb07g011060 | 244 | 245 |
| Solanum chacoense TA1669 4108 | 246 | 247 |
| Saruma henryi DT604565 | 248 | 249 |
| Solanum lycopersicum TC195266 | 250 | 251 |
| Solanum lycopersicum TC206342 | 252 | 253 |
| Solanum tuberosum AM908388 | 254 | 255 |
| Solanum tuberosum NP13064295 | 256 | 257 |
| Solanum lycopersicum 16878 | 258 | 259 |
| Theobroma cacao TC4923 | 260 | 261 |
| Tagetes erecta 417 | 262 | 263 |
| Zea mays GRMZM2G075851 T01 | 264 | 265 |
| Zea mays GRMZM2G093731 T02 | 266 | 267 |
| Zea mays GRMZM2G371316 T01 | 268 | 269 |
| Zingiber officinale TA4076 94328 | 270 | 271 |
| Zingiber officinale TA6335 94328 | 272 | 273 |
| Zingiber officinale TA6947 94328 | 274 | 275 |

### Example II

### Alignment of TLP Polypeptide Sequences

[1058] Alignment of polypeptide sequences was performed using the ClustalW 2.0 algorithm of progressive alignment (Thompson et al. (1997) Nucleic Acids Res 25:4876-4882; Chema et al. (2003); CLUSTAL 2.0.11). Nucleic Acids Res 31:3497-3500) with standard setting (slow alignment, similarity matrix: Gonnet, gap opening penalty 10, gap extension penalty: 0.2). Minor manual editing was done to further optimise the alignment.

### II-1. TLP (Tify Like Protein) Polypeptide

[1059] The TLP polypeptides are aligned in FIG. 2.

[1060] A phylogenetic tree of TLP polypeptides (FIG. 3) was constructed by aligning TLP sequences using MAFFT (Katoh and Toh (2008)—Briefings in Bioinformatics 9:286-298). A neighbour-joining tree was calculated using Quick-Tree (Howe et al. (2002), Bioinformatics 18(11): 1546-7), 100 bootstrap repetitions.

### II-2. PMP22 Polypeptide (22 kDa Peroxisomal Membrane Like Polypeptide)

[1061] The PMP22 polypeptides are aligned in FIG. 7.

[1062] A phylogenetic tree of PMP22 polypeptides (FIG. 8) was constructed by aligning PMP22 sequences using MAFFT (Katoh and Toh (2008)—Briefings in Bioinformatics 9:286-298). A neighbour-joining tree was calculated using Quick-Tree (Howe et al. (2002), Bioinformatics 18(11): 1546-7), 100 bootstrap repetitions.

### II-3. RTF (REM-Like Transcription Factor) Polypeptide

[1063] The RTF polypeptides are aligned in FIG. 12.

[1064] A phylogenetic tree of RTF polypeptides (FIG. 13) was constructed by aligning RTF sequences using MAFFT (Katoh and Toh (2008)—Briefings in Bioinformatics 9:286-298). A neighbour-joining tree was calculated using Quick-Tree (Howe et al. (2002), Bioinformatics 18(11): 1546-7), 100 bootstrap repetitions. The dendrogram was drawn using Dendroscope (Huson et al. (2007), BMC Bioinformatics 8(1):460). Confidence levels for 100 bootstrap repetitions are indicated for major branchings.

### II-4. BP1 (Bigger Plant 1) Polypeptide

[1065] The BP1 polypeptides are aligned in FIG. 17.

[1066] A phylogenetic tree of BP1 polypeptides was constructed by aligning BP1 sequences using MAFFT (Katoh and Toh (2008)—Briefings in Bioinformatics 9:286-298). A neighbour-joining tree was calculated using Quick-Tree (Howe et al. (2002), Bioinformatics 18(11): 1546-7), 100 bootstrap repetitions. The dendrogram (FIG. 18) was drawn using Dendroscope (Huson et al. (2007), BMC Bioinformatics 8(1):460). Confidence levels for 100 bootstrap repetitions are indicated for major branchings.

### Example III

### Calculation of Global Percentage Identity Between Polypeptide Sequences

[1067] Global percentages of similarity and identity between full length polypeptide sequences useful in performing the methods of the invention were determined using one of the methods available in the art, the MatGAT (Matrix Global Alignment Tool) software (BMC Bioinformatics. 2003 4:29. MatGAT: an application that generates similarity/identity matrices using protein or DNA sequences. Campanella J J, Bitincka L, Smalley J; software hosted by Ledion Bitincka). MatGAT software generates similarity/identity matrices for DNA or protein sequences without needing pre-alignment of the data. The program performs a series of pair-wise alignments using the Myers and Miller global alignment algorithm (with a gap opening penalty of 12, and a gap extension penalty of 2), calculates similarity and identity using for example Blosum 62 (for polypeptides), and then places the results in a distance matrix.

### III-1. TLP (Tify Like Protein) Polypeptide

[1068] Results of the analysis are shown in FIG. 4 for the global similarity and identity over the full length of the polypeptide sequences. Sequence similarity is shown in the bottom half of the dividing line and sequence identity is shown in the top half of the diagonal dividing line. Parameters used in the comparison were: Scoring matrix: Blosum62, First Gap: 12, Extending Gap: 2. The sequence identity (in %) between the TLP polypeptide sequences useful in performing the methods of the invention can be as is generally higher than 54.3% compared to SEQ ID NO: 2.

### III-2. PMP22 Polypeptide (22 kDa Peroxisomal Membrane Like Polypeptide)

[1069] Results of the analysis are shown in FIG. 9 for the global similarity and identity over the full length of the polypeptide sequences. Sequence similarity is shown in the bottom half of the dividing line and sequence identity is shown in the top half of the diagonal dividing line. Parameters used in the comparison were: Scoring matrix: Blosum62, First Gap: 12, Extending Gap: 2. The sequence identity (in %) between the PMP22 polypeptide sequences useful in performing the methods of the invention can be as low as 35%, and, thus, is generally higher than 35% compared to SEQ ID NO: 51.

### III-3. RTF (REM-Like Transcription Factor) Polypeptide

[1070] Results of the analysis are shown in FIG. 14 for the global similarity and identity over the full length of the polypeptide sequences. Sequence similarity is shown in the bottom half of the dividing line and sequence identity is shown in the top half of the diagonal dividing line. Parameters used in the comparison were: Scoring matrix: Blosum62, First Gap: 12, Extending Gap: 2.

### III-4. BP1 (Bigger Plant 1) Polypeptide

[1071] Results of the analysis are shown in FIG. 20 for the global similarity and identity over the full length of the polypeptide sequences. Sequence similarity is shown in the bottom half of the dividing line and sequence identity is shown in the top half of the diagonal dividing line. Parameters used in the comparison were: Scoring matrix: Blosum62, First Gap: 12, Extending Gap: 2.

### Example IV

### Identification of Domains Comprised in Polypeptide Sequences Useful in Performing the Methods of the Invention

[1072] The Integrated Resource of Protein Families, Domains and Sites (InterPro) database is an integrated interface for the commonly used signature databases for text- and sequence-based searches. The InterPro database combines these databases, which use different methodologies and varying degrees of biological information about well-characterized proteins to derive protein signatures. Collaborating databases include SWISS-PROT, PROSITE, TrEMBL, PRINTS, Propom and Pfam, Smart and TIGRFAMs. Pfam is a large collection of multiple sequence alignments and hidden Markov models covering many common protein domains and families. Pfam is hosted at the Sanger Institute server in the United Kingdom. Interpro is hosted at the European Bioinformatics Institute in the United Kingdom.

### IV-1. TLP (Tify Like Protein) Polypeptide

[1073] The results of the InterPro scan (see Zdobnov E. M. and Apweiler R.; “InterProScan—an integration platform for the signature-recognition methods in InterPro.”; Bioinformatics, 2001, 17(9): 847-8; InterPro database, Release 31.0, 9th February 2011) of the polypeptide sequence as represented by SEQ ID NO: 2 are presented in Table B1.

[1074] In an embodiment a TLP polypeptide comprises a conserved domain with at least 70%, 71%, 72%, 73%, 74%, 75%, 76%, 77%, 78%, 79%, 80%, 81%, 82%, 83%, 84%, 85%, 86%, 87%, 88%, 89%, 90%, 91%, 92%, 93%, 94%, 95%, 96%, 97%, 98%, or 99% sequence identity to a conserved domain from amino acid 144 to 178 in SEQ ID NO:2 and/or a conserved domain (or motif) with at least 70%, 71%, 72%, 73%, 74%, 75%, 76%, 77%, 78%, 79%, 80%, 81%, 82%, 83%, 84%, 85%, 86%, 87%, 88%, 89%, 90%, 91%, 92%, 93%, 94%, 95%, 96%, 97%, 98%, or 99% sequence identity to a conserved domain from amino acid 282 to 306 in SEQ ID NO:2.

### IV-2. PMP22 Polypeptide (22 kDa Peroxisomal Membrane Like Polypeptide)

[1075] The results of the InterPro scan (see Zdobnov E. M. and Apweiler R.; “InterProScan—an integration platform for the signature-recognition methods in InterPro.”; Bioinformatics, 2001, 17(9): 847-8, InterPro database, Release 31.0, 9th February 2011) of the polypeptide sequence as represented by SEQ ID NO: 51 are presented in Table B2.

[1076] In an embodiment a PMP22 polypeptide comprises a conserved domain (or motif) with at least 70%, 71%, 72%, 73%, 74%, 75%, 76%, 77%, 78%, 79%, 80%, 81%, 82%, 83%, 84%, 85%, 86%, 87%, 88%, 89%, 90%, 91%, 92%, 93%, 94%, 95%, 96%, 97%, 98%, or 99% sequence identity to a conserved domain from amino acid 123 to 367 in SEQ ID NO:51, or from amino acid from 283 to 348 in SEQ ID NO: 51.

### IV-3. RTF (REM-Like Transcription Factor) Polypeptide

[1077] The results of the InterPro scan (see Zdobnov E. M. and Apweiler R.; “InterProScan—an integration platform for the signature-recognition methods in InterPro.”; Bioinformatics, 2001, 17(9): 847-8; InterPro database, Release 31.0, 9th February 2011) of the polypeptide sequence as represented by SEQ ID NO: 140 are presented in Table B3.

[1078] In a preferred embodiment of the present invention, the RTF polypeptide comprises a first, a second, a third and fourth B3 domain. Preferably, the first B3 domain comprises a sequence having, in increasing order of preference, at least 70%, 71%, 72%, 73%, 74%, 75%, 76%, 77%, 78%, 79%, 80%, 81%, 82%, 83%, 84%, 85%, 86%, 87%, 88%, 89%, 90%, 91%, 92%, 93%, 94%, 95%, 96%, 97%, 98%, 99%, or 100% sequence identity to a conserved domain from amino acid 13 to 105 in SEQ ID NO: 140). Preferably, the second B3 domain comprises a sequence having, in increasing order of preference, at least 70%, 71%, 72%, 73%, 74%, 75%, 76%, 77%, 78%, 79%, 80%, 81%, 82%, 83%, 84%, 85%, 86%, 87%, 88%, 89%, 90%, 91%, 92%, 93%, 94%, 95%, 96%, 97%, 98%, 99%, or 100% sequence identity to a conserved domain from amino acid 150 to 247 in SEQ ID NO: 140). Preferably, the third B3 domain comprises a sequence having, in increasing order of preference, at least 70%, 71%, 72%, 73%, 74%, 75%, 76%, 77%, 78%, 79%, 80%, 81%, 82%, 83%, 84%, 85%, 86%, 87%, 88%, 89%, 90%, 91%, 92%, 93%, 94%, 95%, 96%, 97%, 98%, 99%, or 100% sequence identity to a conserved domain from amino acid 276 to 372 in SEQ ID NO: 140). Preferably, the fourth B3 domain comprises a sequence having, in increasing order of preference, at least 70%, 71%, 72%, 73%, 74%, 75%, 76%, 77%, 78%, 79%, 80%, 81%, 82%, 83%, 84%, 85%, 86%, 87%, 88%, 89%, 90%, 91%, 92%, 93%, 94%, 95%, 96%, 97%, 98%, 99%, or 100% sequence identity to a conserved domain from amino acid 464 to 555 in SEQ ID NO: 140). Preferably, the order within the RTF polypeptide is as follows (from the N- to the C-terminus): first B3 domain, second B3 domain, third B3 domain and fourth B3 domain. Preferably the B3 domains are separated by 10 to 150 amino acids, and, more preferably, by 25 to 95 amino acids.

TABLE B1
InterPro scan results (major accession numbers) of the
polypeptide sequence as represented by SEQ ID NO: 2.

| | | | Amino acid coordinates |
|---|---|---|---|
| Database | Accession number | Accession name | on SEQ ID NO 2 |
| Interpro | IPR010399 | Tify | |
| Interpro | IPR018467 | CO/COL/TOC1 | |
| Pfam | PF06200 | tify | 144 to 178 |
| Pfam | PF09425 | CCT_2 | 282 to 306 |

TABLE B2
InterPro scan results (major accession numbers) of the
polypeptide sequence as represented by SEQ ID NO: 51.

| | | | Amino acid |
|---|---|---|---|
| | Accession | | coordinates of |
| Database | number | Accession name | SEQ ID NO 51 |
| Interpro | IPR007248 | Mpv17/PMP22 | |
| PANTHER | PTHR11266 | PEROXISOMAL MEMBRANE | 123-367 |
| | | PROTEIN 2, PXMP2 (MPV17) | |
| PFAM | PF04117 | Mpv17_PMP22 | 283-348 |

TABLE B3
InterPro scan results (major accession numbers) of the
polypeptide sequence as represented by SEQ ID NO: 140.

| | | | Amino acid |
|---|---|---|---|
| | | | coordinates on |
| Database | Accession number | Accession name | SEQ ID NO 140 |
| Interpro | IPR003340 | Transcriptional factor B3 | |
| | IPR015300 | DNA-binding | |
| | | pseudobarrel domain | |
| Pfam | pfam02362 | B3 DNA binding domain | 13 to 105 |
| | | | 150 to 247 |
| | | | 276 to 372 |
| | | | 464 to 555 |

### Example V

### Topology Prediction of the TLP Polypeptide Sequences

[1079] TargetP 1.1 predicts the subcellular location of eukaryotic proteins. The location assignment is based on the predicted presence of any of the N-terminal pre-sequences: chloroplast transit peptide (cTP), mitochondrial targeting peptide (mTP) or secretory pathway signal peptide (SP). Scores on which the final prediction is based are not really probabilities, and they do not necessarily add to one. However, the location with the highest score is the most likely according to TargetP, and the relationship between the scores (the reliability class) may be an indication of how certain the prediction is. The reliability class (RC) ranges from 1 to 5, where 1 indicates the strongest prediction. TargetP is maintained at the server of the Technical University of Denmark.

[1080] For the sequences predicted to contain an N-terminal presequence a potential cleavage site can also be predicted.

[1081] A number of parameters were selected, such as organism group (non-plant or plant), cutoff sets (none, predefined set of cutoffs, or user-specified set of cutoffs), and the calculation of prediction of cleavage sites (yes or no).

### V-1. TLP (Tify Like Protein) Polypeptide

[1082] The results of TargetP 1.1 analysis of the polypeptide sequence as represented by SEQ ID NO: 2 are presented in Table C1. The “plant” organism group has been selected, no cutoffs defined, and the predicted length of the transit peptide requested. The subcellular localization of the polypeptide sequence as represented by SEQ ID NO: 2 may be cytoplasmic and/or nuclear.

TABLE C1
TargetP 1.1 analysis of the polypeptide sequence
as represented by SEQ ID NO: 2

| | |
|---|---|
| Length (AA) | 338 |
| Chloroplastic transit peptide | 0.127 |
| Mitochondrial transit peptide | 0.113 |
| Secretory pathway signal peptide | 0.035 |
| Other subcellular targeting | 0.894 |
| Predicted Location | / |
| Reliability class | 2 |

### V-2. PMP22 Polypeptide (22 kDa Peroxisomal Membrane Like Polypeptide)

[1083] The results of TargetP 1.1 analysis of the polypeptide sequence as represented by SEQ ID NO: 51 are presented Table C2. The “plant” organism group has been selected, no cutoffs defined, and the predicted length of the transit peptide requested. The subcellular localization of the polypeptide sequence as represented by SEQ ID NO: 51 may be Chloroplast. Thus the PMP22 polypeptide as set forth herein in preferably located in the Chloroplast. More preferably, it is located in the peroxisomal membrane.

TABLE C2
TargetP 1.1 analysis of the polypeptide sequence
as represented by SEQ ID NO: 51

| | |
|---|---|
| Length (AA) | 376 |
| Chloroplastic transit peptide | 0.915 |
| Mitochondrial transit peptide | 0.098 |
| Secretory pathway signal peptide | 0.013 |
| Other subcellular targeting | 0.142 |
| Predicted Location | Chloroplast |
| Reliability class | 2 |
| Predicted transit peptide length | / |

### V-3. RTF (REM-Like Transcription Factor) Polypeptide

[1084] The results of TargetP 1.1 analysis of the polypeptide sequence as represented by SEQ ID NO: 140 are presented Table C3. The “plant” organism group has been selected, no cutoffs defined, and the predicted length of the transit peptide requested. The subcellular localization of the polypeptide sequence as represented by SEQ ID NO: 140 may be the nucleus. Accordingly, the RTF polypeptide is, preferably, located in the nucleus.

TABLE C3
TargetP 1.1 analysis of the polypeptide sequence
as represented by SEQ ID NO: 140

| | |
|---|---|
| Length (AA) | 555 |
| Chloroplastic transit peptide | |
| Mitochondrial transit peptide | 0.079 |
| Secretory pathway signal peptide | 0.252 |
| Other subcellular targeting | 0.737 |
| Predicted Location | / |
| Reliability class | 3 |
| Predicted transit peptide length | / |

### V-4. BP1 (Bigger Plant 1) Polypeptide

[1085] The analysis shows that subcellular localization of the polypeptide sequence as represented by SEQ ID NO: 171, is most likely the nucleus. Accordingly, the BP1 polypeptide as set forth herein in the context of the method of the present invention is, preferably, localized in the nucleus.

[1086] An analysis using PSORT (URL: psort.org) also indicated that the polypeptide having a sequence as shown in SEQ ID NO: 171 is located in the nucleus (0.91). A further analysis using ChloroP 1.1 hosted on the server of the Technical University of Denmark indicated that said polypeptide is non-chloroplastic.

[1087] Many other algorithms can be used to perform such analyses, including:
[1088] ChloroP 1.1 hosted on the server of the Technical University of Denmark;
[1089] Protein Prowler Subcellular Localisation Predictor version 1.2 hosted on the server of the Institute for Molecular Bioscience, University of Queensland, Brisbane, Australia;
[1090] PENCE Proteome Analyst PA-GOSUB 2.5 hosted on the server of the University of Alberta, Edmonton, Alberta, Canada;
[1091] TMHMM, hosted on the server of the Technical University of Denmark
[1092] PSORT (URL: psort.org)
[1093] PLOC (Park and Kanehisa, Bioinformatics, 19, 1656-1663, 2003).

### Example VII

### VII-1. TLP (Tify Like Protein) Polypeptide

### Cloning of the TLP Encoding Nucleic Acid Sequence

[1094] The nucleic acid sequence was amplified by PCR using as template a custom-made Solanum lycopersicum seedlings cDNA library. PCR was performed using a commercially available proofreading Taq DNA polymerase in standard conditions, using 200 ng of template in a 50 μl PCR mix. The primers used were prm16282 (SEQ ID NO: 48; sense, start codon in bold):

5′ ggggacaagtttgtacaaaaaagcaggcttaaacaatggagagggactttatggga 3′
and prm16282 (SEQ ID NO: 49; reverse, complementary):
5′ ggggaccactttgtacaagaaagctgggtgtggaagttgcagagaaacca3′,

which include the AttB sites for Gateway recombination. The amplified PCR fragment was purified also using standard methods. The first step of the Gateway procedure, the BP reaction, was then performed, during which the PCR fragment recombined in vivo with the pDONR201 plasmid to produce, according to the Gateway terminology, an “entry clone”, pTLP. Plasmid pDONR201 was purchased from Invitrogen, as part of the Gateway® technology.

[1095] The cDNA library used for cloning was custom made from different tissues (eg leaves, roots) of Solanum lycopersicum seedlings grown from seeds obtained in Belgium.

[1096] The entry clone comprising SEQ ID NO: 1 was then used in an LR reaction with a destination vector used for Oryza sativa transformation. This vector contained as functional elements within the T-DNA borders: a plant selectable marker; a screenable marker expression cassette; and a Gateway cassette intended for LR in vivo recombination with the nucleic acid sequence of interest already cloned in the entry clone. A rice GOS2 promoter (SEQ ID NO: 46) for constitutive expression was located upstream of this Gateway cassette.

[1097] After the LR recombination step, the resulting expression vector pGOS2::TLP (FIG. 5) was transformed into Agrobacterium strain LBA4044 according to methods well known in the art.

### VII-2. PMP22 Polypeptide (22 kDa Peroxisomal Membrane Like Polypeptide)

### Cloning of the PMP22 Encoding Nucleic Acid Sequence

[1098] The nucleic acid sequence was amplified by PCR using as template a custom-made Solanum lycopersicum seedlings cDNA library. PCR was performed using a commercially available proofreading Taq DNA polymerase in standard conditions, using 200 ng of template in a 50 μl PCR mix. The primers used were primer16396 (SEQ ID NO: 137; sense, start codon in bold):

5′ ggggacaagtttgtacaaaaaagcaggcttaaacaatggcgaccatc
aatgg 3′
and primer16397 (SEQ ID NO: 138; reverse
complementary):
5′ ggggaccactttgtacaagaaagctgggtaattttggttgtgtcatt
gct 3′,

which include the AttB sites for Gateway recombination. The amplified PCR fragment was purified also using standard methods. The first step of the Gateway procedure, the BP reaction, was then performed, during which the PCR fragment recombined in vivo with the pDONR201 plasmid to produce, according to the Gateway terminology, an “entry clone”, pPMP22. Plasmid pDONR201 was purchased from Invitrogen, as part of the Gateway® technology.

[1099] The cDNA library used for cloning was custom made from different tissues (eg leaves, roots) of Solanum lycopersicum seedlings grown from seeds obtained in Belgium.

[1100] The entry clone comprising SEQ ID NO: 50 was then used in an LR reaction with a destination vector used for Oryza sativa transformation. This vector contained as functional elements within the T-DNA borders: a plant selectable marker; a screenable marker expression cassette; and a Gateway cassette intended for LR in vivo recombination with the nucleic acid sequence of interest already cloned in the entry clone. A rice GOS2 promoter (SEQ ID NO: 135) for constitutive expression was located upstream of this Gateway cassette.

[1101] After the LR recombination step, the resulting expression vector pGOS2::PMP22 (FIG. 10) was transformed into Agrobacterium strain LBA4044 according to methods well known in the art.

### VII-3. RTF (REM-Like Transcription Factor) Polypeptide

### Cloning of the RTF Encoding Nucleic Acid Sequence

[1102] The nucleic acid sequence was amplified by PCR using as template a custom-made Arabidopsis thaliana seedlings cDNA library. PCR was performed using a commercially available proofreading Taq DNA polymerase in standard conditions, using 200 ng of template in a 50 μl PCR mix. The primers used were prm15379 (SEQ ID NO: 168; sense, start codon in bold):

5′ ggggacaagtttgtacaaaaaagcaggcttaaacaatggctaatccacttctctat 3′
and prm15380 (SEQ ID NO: 169; reverse, complementary):
5′ ggggaccactttgtacaagaaagctgggtcgatgatcctagacattctta 3′,

which include the AttB sites for Gateway recombination. The amplified PCR fragment was purified also using standard methods. The first step of the Gateway procedure, the BP reaction, was then performed, during which the PCR fragment recombined in vivo with the pDONR201 plasmid to produce, according to the Gateway terminology, an “entry clone”, pRTF. Plasmid pDONR201 was purchased from Invitrogen, as part of the Gateway® technology.

[1103] The cDNA library used for cloning was custom made from different tissues (eg leaves, roots) of Arabidopsis thaliana Col-0 seedlings grown from seeds obtained in Belgium.

[1104] The entry clone comprising SEQ ID NO: 139 was then used in an LR reaction with a destination vector used for Oryza sativa transformation. This vector contained as functional elements within the T-DNA borders: a plant selectable marker; a screenable marker expression cassette; and a Gateway cassette intended for LR in vivo recombination with the nucleic acid sequence of interest already cloned in the entry clone. A rice GOS2 promoter (SEQ ID NO: 167) for constitutive expression was located upstream of this Gateway cassette.

[1105] After the LR recombination step, the resulting expression vector pGOS2::RTF (FIG. 15) was transformed into Agrobacterium strain LBA4044 according to methods well known in the art.

### VII-4. BP1 (Bigger Plant 1) Polypeptide

### Cloning of the BP1 Encoding Nucleic Acid Sequence

[1106] The nucleic acid sequence was amplified by PCR using as template a custom-made Oryza sativa seedlings cDNA library. PCR was performed using a commercially available proofreading Taq DNA polymerase in standard conditions, using 200 ng of template in a 50 μl PCR mix. The primers used were prm16202 (SEQ ID NO: 284; sense, start codon in bold):

5′ ggggacaagtttgtacaaaaaagcaggcttaaacaatggactacgg
cgacg 3′
and prm16203 (SEQ ID NO: 285; reverse,
complementary):
5′ ggggaccactttgtacaagaaagctgggtaaggatgttatttcata
gcca 3′,

which include the AttB sites for Gateway recombination. The amplified PCR fragment was purified also using standard methods. The first step of the Gateway procedure, the BP reaction, was then performed, during which the PCR fragment recombined in vivo with the pDONR201 plasmid to produce, according to the Gateway terminology, an “entry clone”, pBP1. Plasmid pDONR201 was purchased from Invitrogen, as part of the Gateway® technology.

[1107] The cDNA library used for cloning was custom made from different tissues (eg leaves, roots) of Oryza sativa seedlings. The entry clone comprising SEQ ID NO: 170 was then used in an LR reaction with a destination vector used for Oryza sativa transformation. This vector contained as functional elements within the T-DNA borders: a plant selectable marker; a screenable marker expression cassette; and a Gateway cassette intended for LR in vivo recombination with the nucleic acid sequence of interest already cloned in the entry clone. A rice GOS2 promoter (SEQ ID NO: 282) for constitutive expression was located upstream of this Gateway cassette.

[1108] After the LR recombination step, the resulting expression vector pGOS2::BP1 (FIG. 19) was transformed into Agrobacterium strain LBA4044 according to methods well known in the art.

### Example VIII

### Plant Transformation

### Rice Transformation

[1109] The Agrobacterium containing the expression vector was used to transform Oryza sativa plants. Mature dry seeds of the rice japonica cultivar Nipponbare were dehusked. Sterilization was carried out by incubating for one minute in 70% ethanol, followed by 30 minutes in 0.2% HgCl₂, followed by a 6 times 15 minutes wash with sterile distilled water. The sterile seeds were then germinated on a medium containing 2,4-D (callus induction medium). After incubation in the dark for four weeks, embryogenic, scutellum-derived calli were excised and propagated on the same medium. After two weeks, the calli were multiplied or propagated by subculture on the same medium for another 2 weeks. Embryogenic callus pieces were sub-cultured on fresh medium 3 days before co-cultivation (to boost cell division activity).

[1110] Agrobacterium strain LBA4404 containing the expression vector was used for co-cultivation. Agrobacterium was inoculated on AB medium with the appropriate antibiotics and cultured for 3 days at 28° C. The bacteria were then collected and suspended in liquid co-cultivation medium to a density (OD₆₀₀) of about 1. The suspension was then transferred to a Petri dish and the calli immersed in the suspension for 15 minutes. The callus tissues were then blotted dry on a filter paper and transferred to solidified, co-cultivation medium and incubated for 3 days in the dark at 25° C. Co-cultivated calli were grown on 2,4-D-containing medium for 4 weeks in the dark at 28° C. in the presence of a selection agent. During this period, rapidly growing resistant callus islands developed. After transfer of this material to a regeneration medium and incubation in the light, the embryogenic potential was released and shoots developed in the next four to five weeks. Shoots were excised from the calli and incubated for 2 to 3 weeks on an auxin-containing medium from which they were transferred to soil. Hardened shoots were grown under high humidity and short days in a greenhouse.

[1111] Approximately 35 independent T0 rice transformants were generated for one the TLP and RTF constructs. Approximately 35 to 90 independent T0 rice transformants were generated for one the PMP22 and BP1 constructs. The primary transformants were transferred from a tissue culture chamber to a greenhouse. After a quantitative PCR analysis to verify copy number of the T-DNA insert, only single copy transgenic plants that exhibit tolerance to the selection agent were kept for harvest of T1 seed. Seeds were then harvested three to five months after transplanting. The method yielded single locus transformants at a rate of over 50% (Aldemita and Hodges 1996, Chan et al. 1993, Hiei et al. 1994).

[1112] Alternatively the following method may be used:

[1113] The Agrobacterium containing the expression vector is used to transform Oryza sativa plants. Mature dry seeds of the rice japonica cultivar Nipponbare are dehusked. Sterilization is carried out by incubating for one minute in 70% ethanol, followed by 30 to 60 minutes, preferably 30 minutes in sodium hypochlorite solution (depending on the grade of contamination), followed by a 3 to 6 times, preferably 4 time ish with sterile distilled water. The sterile seeds are then germinated on a medium containing 2,4-D (callus induction medium). After incubation in light for 6 days scutellum-derived calli is transformed with Agrobacterium as described herein below.

[1114] Agrobacterium strain LBA4404 containing the expression vector is used for co-cultivation. Agrobacterium is inoculated on AB medium with the appropriate antibiotics and cultured for 3 days at 28° C. The bacteria are then collected and suspended in liquid co-cultivation medium to a density (OD₆₀₀) of about 1. The calli are immersed in the suspension for 1 to 15 minutes. The callus tissues are then blotted dry on a filter paper and transferred to solidified, co-cultivation medium and incubated for 3 days in the dark at 25° C. After ishing away the Agrobacterium, the calli are grown on 2,4-D-containing medium for 10 to 14 days (growth time for indica: 3 weeks) under light at 28° C.-32° C. in the presence of a selection agent. During this period, rapidly growing resistant callus developed. After transfer of this material to regeneration media, the embryogenic potential is released and shoots developed in the next four to six weeks. Shoots are excised from the calli and incubated for 2 to 3 weeks on an auxin-containing medium from which they are transferred to soil. Hardened shoots are grown under high humidity and short days in a greenhouse.

[1115] Transformation of rice cultivar indica can also be done in a similar way as give above according to techniques well known to a skilled person.

[1116] 35 to 90 independent T0 rice transformants are generated for one construct. The primary transformants are transferred from a tissue culture chamber to a greenhouse. After a quantitative PCR analysis to verify copy number of the T-DNA insert, only single copy transgenic plants that exhibit tolerance to the selection agent are kept for harvest of T1 seed. Seeds are then harvested three to five months after transplanting. The method yielded single locus transformants at a rate of over 50% (Aldemita and Hodges 1996, Chan et al. 1993, Hiei et al. 1994).

### Example IX

### Transformation of Other Crops

### Corn Transformation

[1117] Transformation of maize (Zea mays) is performed with a modification of the method described by Ishida et al. (1996) Nature Biotech 14(6): 745-50. Transformation is genotype-dependent in corn and only specific genotypes are amenable to transformation and regeneration. The inbred line A188 (University of Minnesota) or hybrids with A188 as a parent are good sources of donor material for transformation, but other genotypes can be used successfully as well. Ears are harvested from corn plant approximately 11 days after pollination (DAP) when the length of the immature embryo is about 1 to 1.2 mm. Immature embryos are cocultivated with Agrobacterium tumefaciens containing the expression vector, and transgenic plants are recovered through or ganogenesis. Excised embryos are grown on callus induction medium, then maize regeneration medium, containing the selection agent (for example imidazolinone but various selection markers can be used). The Petri plates are incubated in the light at 25° C. for 2-3 weeks, or until shoots develop. The green shoots are transferred from each embryo to maize rooting medium and incubated at 25° C. for 2-3 weeks, until roots develop. The rooted shoots are transplanted to soil in the greenhouse. T1 seeds are produced from plants that exhibit tolerance to the selection agent and that contain a single copy of the T-DNA insert.

### Wheat Transformation

[1118] Transformation of wheat is performed with the method described by Ishida et al. (1996) Nature Biotech 14(6): 745-50. The cultivar Bobwhite (available from CIMMYT, Mexico) is commonly used in transformation. Immature embryos are co-cultivated with Agrobacterium tumefaciens containing the expression vector, and transgenic plants are recovered through organogenesis. After incubation with Agrobacterium, the embryos are grown in vitro on callus induction medium, then regeneration medium, containing the selection agent (for example imidazolinone but vanous selection markers can be used). The Petri plates are incubated in the light at 25° C. for 2-3 weeks, or until shoots develop. The green shoots are transferred from each embryo to rooting medium and incubated at 25° C. for 2-3 weeks, until roots develop. The rooted shoots are transplanted to soil in the greenhouse. T1 seeds are produced from plants that exhibit tolerance to the selection agent and that contain a single copy of the T-DNA insert.

### Soybean Transformation

[1119] Soybean is transformed according to a modification of the method described in the Texas A&M U.S. Pat. No. 5,164,310. Several commercial soybean varieties are amenable to transformation by this method. The cultivar Jack (available from the Illinois Seed foundation) is commonly used for transformation. Soybean seeds are sterilised for in vitro sowing. The hypocotyl, the radicle and one cotyledon are excised from seven-day old young seedlings. The epicotyl and the remaining cotyledon are further grown to develop axillary nodes. These axillary nodes are excised and incubated with Agrobacterium tumefaciens containing the expression vector. After the cocultivation treatment, the explants are washed and transferred to selection media. Regenerated shoots are excised and placed on a shoot elongation medium. Shoots no longer than 1 cm are placed on rooting medium until roots develop. The rooted shoots are transplanted to soil in the greenhouse. T1 seeds are produced from plants that exhibit tolerance to the selection agent and that contain a single copy of the T-DNA insert.

### Rapeseed/Canola Transformation

[1120] Cotyledonary petioles and hypocotyls of 5-6 day old young seedling are used as explants for tissue culture and transformed according to Babic et al. (1998, Plant Cell Rep 17: 183-188). The commercial cultivar Westar (Agriculture Canada) is the standard variety used for transformation, but other varieties can also be used. Canola seeds are surface-sterilized for in vitro sowing. The cotyledon petiole explants with the cotyledon attached are excised from the in vitro seedlings, and inoculated with Agrobacterium (containing the expression vector) by dipping the cut end of the petiole explant into the bacterial suspension. The explants are then cultured for 2 days on MSBAP-3 medium containing 3 mg/l BAP, 3% sucrose, 0.7% Phytagar at 23° C., 16 hr light. After two days of co-cultivation with Agrobacterium, the petiole explants are transferred to MSBAP-3 medium containing 3 mg/l BAP, cefotaxime, carbenicillin, or timentin (300 mg/l) for 7 days, and then cultured on MSBAP-3 medium with cefotaxime, carbenicillin, or timentin and selection agent until shoot regeneration. When the shoots are 5-10 mm in length, they are cut and transferred to shoot elongation medium (MSBAP-0.5, containing 0.5 mg/l BAP). Shoots of about 2 cm in length are transferred to the rooting medium (MS0) for root induction. The rooted shoots are transplanted to soil in the greenhouse. T1 seeds are produced from plants that exhibit tolerance to the selection agent and that contain a single copy of the T-DNA insert.

### Alfalfa Transformation

[1121] A regenerating clone of alfalfa (Medicago sativa) is transformed using the method of (McKersie et al., 1999 Plant Physiol 119: 839-847). Regeneration and transformation of alfalfa is genotype dependent and therefore a regenerating plant is required. Methods to obtain regenerating plants have been described. For example, these can be selected from the cultivar Rangelander (Agriculture Canada) or any other commercial alfalfa variety as described by Brown D C W and A Atanassov (1985. Plant Cell Tissue Organ Culture 4: 111-112). Alternatively, the RA3 variety (University of Wisconsin) has been selected for use in tissue culture (Walker et al., 1978 Am J Bot 65:654-659). Petiole explants are cocultivated with an overnight culture of Agrobacterium tumefaciens C58C1 pMP90 (McKersie et al., 1999 Plant Physiol 119: 839-847) or LBA4404 containing the expression vector. The explants are cocultivated for 3 d in the dark on SH induction medium containing 288 mg/L Pro, 53 mg/L thioproline, 4.35 g/L K2SO4, and 100 μm acetosyringinone. The explants are washed in half-strength Murashige-Skoog medium (Murashige and Skoog, 1962) and plated on the same SH induction medium without acetosyringinone but with a suitable selection agent and suitable antibiotic to inhibit Agrobacterium growth. After several weeks, somatic embryos are transferred to BOi2Y development medium containing no growth regulators, no antibiotics, and 50 g/L sucrose. Somatic embryos are subsequently germinated on half-strength Murashige-Skoog medium. Rooted seedlings were transplanted into pots and grown in a greenhouse. T1 seeds are produced from plants that exhibit tolerance to the selection agent and that contain a single copy of the T-DNA insert.

### Cotton Transformation

[1122] Cotton is transformed using Agrobacterium tumefaciens according to the method described in U.S. Pat. No. 5,159,135. Cotton seeds are surface sterilised in 3% sodium hypochlorite solution during 20 minutes and washed in distilled water with 500 μg/ml cefotaxime. The seeds are then transferred to SH-medium with 50 μg/ml benomyl for germination. Hypocotyls of 4 to 6 days old seedlings are removed, cut into 0.5 cm pieces and are placed on 0.8% agar. An Agrobacterium suspension (approx. 108 cells per ml, diluted from an overnight culture transformed with the gene of interest and suitable selection markers) is used for inoculation of the hypocotyl explants. After 3 days at room temperature and lighting, the tissues are transferred to a solid medium (1.6 g/l Gelrite) with Murashige and Skoog salts with B5 vitamins (Gamborg et al., Exp. Cell Res. 50:151-158 (1968)), 0.1 mg/l 2,4-D, 0.1 mg/l 6-furfurylaminopurine and 750 μg/ml MgCL2, and with 50 to 100 μg/ml cefotaxime and 400-500 μg/ml carbenicillin to kill residual bacteria. Individual cell lines are isolated after two to three months (with subcultures every four to six weeks) and are further cultivated on selective medium for tissue amplification (30° C., 16 hr photoperiod). Transformed tissues are subsequently further cultivated on non-selective medium during 2 to 3 months to give rise to somatic embryos. Healthy looking embryos of at least 4 mm length are transferred to tubes with SH medium in fine vermiculite, supplemented with 0.1 mg/l indole acetic acid, 6 furfurylaminopurine and gibberellic acid. The embryos are cultivated at 30° C. with a photoperiod of 16 hrs, and plantlets at the 2 to 3 leaf stage are transferred to pots with vermiculite and nutrients. The plants are hardened and subsequently moved to the greenhouse for further cultivation.

### Sugarbeet Transformation

[1123] Seeds of sugarbeet (Beta vulgaris L.) are sterilized in 70% ethanol for one minute followed by 20 min. shaking in 20% Hypochlorite bleach e.g. Clorox® regular bleach (commercially available from Clorox, 1221 Broadway, Oakland, Calif. 94612, USA). Seeds are rinsed with sterile water and air dried followed by plating onto germinating medium (Murashige and Skoog (MS) based medium (see Murashige, T., and Skoog, 1962. A revised medium for rapid growth and bioassays with tobacco tissue cultures. Physiol. Plant, vol. 15, 473-497) including B5 vitamins (Gamborg et al.; Nutrient requirements of suspension cultures of soybean root cells. Exp. Cell Res., vol. 50, 151-8.) supplemented with 10 g/l sucrose and 0.8% agar). Hypocotyl tissue is used essentially for the initiation of shoot cultures according to Hussey and Hepher (Hussey, G., and Hepher, A., 1978. Clonal propagation of sugarbeet plants and the formation of polylTLPds by tissue culture. Annals of Botany, 42, 477-9) and are maintained on MS based medium supplemented with 30 g/l sucrose plus 0.25 mg/l benzylamino purine and 0.75% agar, pH 5.8 at 23-25° C. with a 16-hour photoperiod.

[1124] Agrobacterium tumefaciens strain carrying a binary plasmid harbouring a selectable marker gene for example nptII is used in transformation experiments. One day before transformation, a liquid LB culture including antibiotics is grown on a shaker (28° C., 150 rpm) until an optical density (O.D.) at 600 nm of ˜1 is reached. Overnight-grown bacterial cultures are centrifuged and resuspended in inoculation medium (O.D. ˜1) including Acetosyringone, pH 5.5.

[1125] Shoot base tissue is cut into slices (1.0 cm×1.0 cm×2.0 mm approximately). Tissue is immersed for 30s in liquid bacterial inoculation medium. Excess liquid is removed by filter paper blotting. Co-cultivation occurred for 24-72 hours on MS based medium incl. 30 g/l sucrose followed by a non-selective period including MS based medium, 30 g/l sucrose with 1 mg/l BAP to induce shoot development and cefotaxim for eliminating the Agrobacterium. After 3-10 days explants are transferred to similar selective medium harbouring for example kanamycin or G418 (50-100 mg/l genotype dependent).

[1126] Tissues are transferred to fresh medium every 2-3 weeks to maintain selection pressure. The very rapid initiation of shoots (after 3-4 days) indicates regeneration of existing meristems rather than organogenesis of newly developed transgenic meristems. Small shoots are transferred after several rounds of subculture to root induction medium containing 5 mg/l NAA and kanamycin or G418. Additional steps are taken to reduce the potential of generating transformed plants that are chimeric (partially transgenic). Tissue samples from regenerated shoots are used for DNA analysis.

[1127] Other transformation methods for sugarbeet are known in the art, for example those by Linsey & Gallois (Linsey, K., and Gallois, P., 1990. Transformation of sugarbeet (Beta vulgaris) by Agrobacterium tumefaciens. Journal of Experimental Botany; vol. 41, No. 226; 529-36) or the methods published in the international application published as WO9623891A.

### Sugarcane Transformation

[1128] Spindles are isolated from 6-month-old field grown sugarcane plants (see Arencibia A., at al., 1998. An efficient protocol for sugarcane (Saccharum spp. L.) transformation mediated by Agrobacterium tumefaciens. Transgenic Research, vol. 7, 213-22; Enriquez-Obregon G., et al., 1998. Herbicide-resistant sugarcane (Saccharum officinarum L.) plants by Agrabacterium-mediated transformation. Planta, vol. 206, 20-27). Material is sterilized by immersion in a 20% Hypochlorite bleach e.g. Clorox® regular bleach (commercially available from Clorox, 1221 Broadway, Oakland, Calif. 94612, USA) for 20 minutes. Transverse sections around 0.5 cm are placed on the medium in the top-up direction. Plant material is cultivated for 4 weeks on MS (Murashige, T., and Skoog, 1962. A revised medium for rapid growth and bioassays with tobacco tissue cultures. Physiol. Plant, vol. 15, 473-497) based medium incl. B5 vitamins (Gamborg, O., et al., 1968. Nutrient requirements of suspension cultures of soybean root cells. Exp. Cell Res., vol. 50, 151-8) supplemented with 20 g/l sucrose, 500 mg/l casein hydrolysate, 0.8% agar and 5 mg/l 2,4-D at 23° C. in the dark. Cultures are transferred after 4 weeks onto identical fresh medium.

[1129] Agrobacterium tumefaciens strain carrying a binary plasmid harbouring a selectable marker gene for example hpt is used in transformation experiments. One day before transformation, a liquid LB culture including antibiotics is grown on a shaker (28° C., 150 rpm) until an optical density (O.D.) at 600 nm of ˜0.6 is reached. Overnight-grown bacterial cultures are centrifuged and resuspended in MS based inoculation medium (O.D. ˜0.4) including acetosyringone, pH 5.5.

[1130] Sugarcane embryogenic calli pieces (2-4 mm) are isolated based on morphological characteristics as compact structure and yellow colour and dried for 20 min. in the flow hood followed by immersion in a liquid bacterial inoculation medium for 10-20 minutes. Excess liquid is removed by filter paper blotting. Co-cultivation occurred for 3-5 days in the dark on filter paper which is placed on top of MS based medium incl. B5 vitamins containing 1 mg/l 2,4-D. After co-cultivation calli are ished with sterile water followed by a non-selective period on similar medium containing 500 mg/l cefotaxime for eliminating the Agrobacterium. After 3-10 days explants are transferred to MS based selective medium incl. B5 vitamins containing 1 mg/l 2,4-D for another 3 weeks harbouring 25 mg/l of hygromycin (genotype dependent). All treatments are made at 23° C. under dark conditions.

[1131] Resistant calli are further cultivated on medium lacking 2,4-D including 1 mg/l BA and 25 mg/l hygromycin under 16 h light photoperiod resulting in the development of shoot structures. Shoots are isolated and cultivated on selective rooting medium (MS based including, 20 g/l sucrose, 20 mg/l hygromycin and 500 mg/l cefotaxime). Tissue samples from regenerated shoots are used for DNA analysis.

[1132] Other transformation methods for sugarcane are known in the art, for example from the international application published as WO2010/151634A and the granted European patent EP1831378.

### Example X

### Phenotypic Evaluation Procedure

### 10.1 Evaluation Setup

[1133] Approximately 35 independent T0 rice transformants were generated. The primary transformants were transferred from a tissue culture chamber to a greenhouse for growing and harvest of T1 seed. Six events, of which the T1 progeny segregated 3:1 for presence/absence of the transgene, were retained. For each of these events, approximately 10 T1 seedlings containing the transgene (hetero- and homo-zygotes) and approximately 10 T1 seedlings lacking the transgene (nullizygotes) were selected by monitoring visual marker expression. The transgenic plants and the corresponding nullizygotes were grown side-by-side at random positions. Greenhouse conditions were of shorts days (12 hours light), 28° C. in the light and 22° C. in the dark, and a relative humidity of 70%. Plants grown under non-stress conditions were watered at regular intervals to ensure that water and nutrients were not limiting and to satisfy plant needs to complete growth and development, unless they were used in a stress screen.

[1134] From the stage of sowing until the stage of maturity the plants were passed several times through a digital imaging cabinet. At each time Point digital images (2048×1536 pixels, 16 million colours) were taken of each plant from at least 6 different angles.

[1135] T1 events can be further evaluated in the T2 generation following the same evaluation procedure as for the T1 generation, e.g. with less events and/or with more individuals per event.

### Drought Screen

[1136] T1 or T2 plants are grown in potting soil under normal conditions until they approached the heading stage. They are then transferred to a “dry” section where irrigation is withheld. Soil moisture probes are inserted in randomly chosen pots to monitor the soil water content (SWC). When SWC goes below certain thresholds, the plants are automatically re-watered continuously until a normal level is reached again. The plants are then re-transferred again to normal conditions. The rest of the cultivation (plant maturation, seed harvest) is the same as for plants not grown under abiotic stress conditions. Growth and yield parameters are recorded as detailed for growth under normal conditions.

### Nitrogen Use Efficiency Screen

[1137] T1 or T2 plants are grown in potting soil under normal conditions except for the nutrient solution. The pots are watered from transplantation to maturation with a specific nutrient solution containing reduced N nitrogen (N) content, usually between 7 to 8 times less. The rest of the cultivation (plant maturation, seed harvest) is the same as for plants not grown under abiotic stress. Growth and yield parameters are recorded as detailed for growth under normal conditions.

### Salt Stress Screen

[1138] T1 or T2 plants are grown on a substrate made of coco fibers and particles of baked clay (Argex) (3 to 1 ratio). A normal nutrient solution is used during the first two weeks after transplanting the plantlets in the greenhouse. After the first two weeks, 25 mM of salt (NaCl) is added to the nutrient solution, until the plants are harvested. Growth and yield parameters are recorded as detailed for growth under normal conditions.

### 10.2 Statistical Analysis: F Test

[1139] A two factor ANOVA (analysis of variants) was used as a statistical model for the overall evaluation of plant phenotypic characteristics. An F test was carried out on all the parameters measured of all the plants of all the events transformed with the gene of the present invention. The F test was carried out to check for an effect of the gene over all the transformation events and to verify for an overall effect of the gene, also known as a global gene effect. The threshold for significance for a true global gene effect was set at a 5% probability level for the F test. A significant F test value Points to a gene effect, meaning that it is not only the mere presence or position of the gene that is causing the differences in phenotype.

[1140] Because two experiments with overlapping events were carried out, a combined analysis was performed. This is useful to check consistency of the effects over the two experiments, and if this is the case, to accumulate evidence from both experiments in order to increase confidence in the conclusion. The method used was a mixed-model approach that takes into account the multilevel structure of the data (i.e. experiment—event—segregants). P values were obtained by comparing likelihood ratio test to chi square distributions.

### 10.3 Parameters Measured

[1141] From the stage of sowing until the stage of maturity the plants were passed several times through a digital imaging cabinet. At each time point digital images (2048×1536 pixels, 16 million colours) were taken of each plant from at least 6 different angles as described in WO2010/031780. These measurements were used to determine different parameters.

### Biomass-Related Parameter Measurement

[1142] The plant aboveground area (or leafy biomass) was determined by counting the total number of pixels on the digital images from aboveground plant parts discriminated from the background. This value was averaged for the pictures taken on the same time Point from the different angles and was converted to a physical surface value expressed in square mm by calibration. Experiments show that the aboveground plant area measured this way correlates with the biomass of plant parts above ground. The above ground area is the area measured at the time Point at which the plant had reached its maximal leafy biomass.

[1143] Increase in root biomass is expressed as an increase in total root biomass (measured as maximum biomass of roots observed during the lifespan of a plant); or as an increase in the root/shoot index, measured as the ratio between root mass and shoot mass in the period of active growth of root and shoot. In other words, the root/shoot index is defined as the ratio of the rapidity of root growth to the rapidity of shoot growth in the period of active growth of root and shoot. Root biomass can be determined using a method as described in WO 2006/029987.

### Parameters Related to Development Time

[1144] The early vigour is the plant aboveground area three weeks post-germination. Early vigour was determined by counting the total number of pixels from aboveground plant parts discriminated from the background. This value was averaged for the pictures taken on the same time Point from different angles and was converted to a physical surface value expressed in square mm by calibration.

[1145] Early seedling vigour is the seedling aboveground area post-germination (plantlets of about 4 cm high).

[1146] AreaEmer is an indication of quick early development when this value is decreased compared to control plants. It is the ratio (expressed in %) between the time a plant needs to make 30% of the final biomass and the time needs to make 90% of its final biomass.

[1147] The “time to flower” or “flowering time” of the plant can be determined using the method as described in WO 2007/093444.

### Seed-Related Parameter Measurements

[1148] The mature primary panicles were harvested, counted, bagged, barcode-labelled and then dried for three days in an oven at 37° C. The panicles were then threshed and all the seeds were collected and counted. The seeds are usually covered by a dry outer covering, the husk. The filled husks (herein also named filled florets) were separated from the empty ones using an airblowing device. The empty husks were discarded and the remaining fraction was counted again. The filled husks were weighed on an analytical balance.

[1149] The total number of seeds was determined by counting the number of filled husks that remained after the separation step. The total seed weight was measured by weighing all filled husks harvested from a plant.

[1150] The total number of seeds (or florets) per plant was determined by counting the number of husks (whether filled or not) harvested from a plant.

[1151] Thousand Kernel Weight (TKW) is extrapolated from the number of seeds counted and their total weight.

[1152] The Harvest Index (HI) in the present invention is defined as the ratio between the total seed weight and the above ground area (mm²), multiplied by a factor 10⁶.

[1153] The number of flowers per panicle as defined in the present invention is the ratio between the total number of seeds over the number of mature primary panicles.

[1154] The “seed fill rate” or “seed filling rate” as defined in the present invention is the proportion (expressed as a %) of the number of filled seeds (i.e. florets containing seeds) over the total number of seeds (i.e. total number of florets). In other words, the seed filling rate is the percentage of florets that are filled with seed.

### Example XI

### Results of the Phenotypic Evaluation of the Transgenic Plants

### XI-1. TLP (Tify Like Protein) Polypeptide

[1155] The results of the evaluation of transgenic rice plants in the T2 generation and expressing a nucleic acid comprising the longest Open Reading Frame in SEQ ID NO: 1 under non-stress conditions are presented below. See previous Examples for details on the generations of the transgenic plants.

[1156] The results of the evaluation of transgenic rice plants under non-stress conditions are presented below. An increase of 5% or more was observed for aboveground biomass (AreaMax), total seed yield (Totalwgseeds) number of filled seeds (nrfilledseed), number of flowers per panicle (flowerperpan), an increase of 3% was observed for thousand kernel weight (TKW). In addition, plants expressing a TLP nucleic acid showed an increased height, an increased height of the gravity center, increased seedling biomass, an increased proportion of filled seed over the number of florets.

TABLE D1
Data summary for transgenic rice plants; for each parameter, the
overall percent increase is shown for the confirmation
(T2 generation), for each parameter the p-value is <0.05.

| Parameter | Overall increase |
|---|---|
| AreaMax | 5.4 |
| totalwgseeds | 9.7 |
| flowerperpan | 5.0 |
| TKW | 3.0 |
| nrfilledseed | 6.7 |

### XI-2. PMP22 Polypeptide (22 kDa Peroxisomal Membrane Like Polypeptide)

[1157] The results of the evaluation of transgenic rice plants in the T2 generation and expressing a nucleic acid as shown in SEQ ID NO: 50 under non-stress conditions are presented below. See previous Examples for details on the generations of the transgenic plants.

[1158] The results of the evaluation of transgenic rice plants under non-stress conditions are presented below (see Table D2a). An increase of more than 5% was observed for aboveground biomass (AreaMax), number of flowers per panicle (flowerperpan), and of more than 3% for thousand kernel weight (TKW). In addition, plants expressing the PMP22 nucleic acid showed increased seed yield per plant (totalwgseeds), increased seed yield per leafy biomass (harvestindex), and a heightened gravity centre (GravitYMax).

[1159] Table D2a (results of phenotypic evaluation under non-stress conditions). Data summary for transgenic rice plants; for each parameter, the overall percent increase is shown for the confirmation (T2 generation), for each parameter the p-value is <0.05.

| | Overall |
|---|---|
| Parameter | increase |
| AreaMax | 5.1 |
| flowerperpan | 6.9 |
| TKW | 3.1 |

[1160] The results of the evaluation of transgenic rice plants expressing a PMP22 nucleic acid under nitrogen deficiency are presented hereunder (Table D2b). An increase of yield related parameters was observed. In particular, an increase was observed for the seed fillrate (number of filled seeds over the number of florets), number of flowers per panicle (flowerperpan), and thousand kernel weight (TKW). Moreover, increases were observed for the following parameters: final biomass (AreaCycle), number of total seeds (nrtotalseed), number of filled seeds per plant (nrfilledseed), seed yield per plant (totalwgseeds), seed yield per leafy biomass (harvestindex). Also the gravity centre of the plants was heightened (GravitYMax).

[1161] Table D2b (results of phenotypic evaluation under nitrogen deficient conditions). Data summary for transgenic rice plants; for each parameter, the overall percent increase is shown for the confirmation (T2 generation), for each parameter the p-value is <0.05.

| | Overall |
|---|---|
| Parameter | increase |
| fillrate | 7.4 |

### XI-3. RTF (REM-Like Transcription Factor) Polypeptide

[1162] The results of the evaluation of transgenic rice plants in the T2 generation and expressing a nucleic acid encoding the RTF polypeptide of SEQ ID NO: 140 under non stress conditions are presented below in Table D3. When grown under non-stress conditions, an increase of at least 5% was observed for aboveground biomass (AreaMax), root biomass (RootMax and RootThickMax). Moreover, a significantly improved early vigour (Emervigor) was observed since the aboveground area of the leafy biomass was increased by more than 10% as compared to control plants. In addition, plants expressing a RTF nucleic acid had an earlier start point of flowering (a shorter time (in days) needed between sowing and the emergence of the first panicle (timetoflower). Also the number of seeds (nrtotalseeds), the total weight of the seeds (totalwgseeds), and the number of filled seeds (nrfilledseeds) was increased. Moreover, they had an later start point of flowering (a longer time (in days) needed between sowing and the emergence of the first panicle (timetoflower) Moreover, the plants had an increased height as compared to control plants (GravityYMax) in three events

TABLE D3
Data summary for transgenic rice plants; for each parameter, the
overall percent increase is shown for the confirmation
(T2 generation), for each parameter the p-value is <0.05.

| | Overall increase |
|---|---|
| Parameter | [%] |
| AreaMax | 6.4 |
| EmerVigor | 10.7 |
| RootMax | 7.5 |
| RootThickMax | 6.1 |

### XI-4. BP1 (Bigger Plant 1) Polypeptide

[1163] Transgenic rice plants expressing a BP1 (SEQ ID NO: 170) nucleic acid under nitrogen deficient conditions showed an increase for the following yield related parameters: aboveground biomass (Areamax), root biomass (RootMax), total seed yield per plant (totalwgseeds), flowers per panicle (flowersperpan), number of filled seeds per plant (nrfilledseed), and number of thick roots (RootThickMax). For example, the Areamax was increased by 7 to 10% (with a p-value between or equal to 0.2 and 0.1), and Rootmax values were increased from 10% to 13% with a p-value between or equal to 0.2 and 0.1. In at least two events the RootThickMax value was increased around 10% with a p-value between or equal to 0.2 and 0.1.

The application's sequence listing, which the Patent Office published only in electronic form, follows.

SEQUENCE LISTING (297 sequences)

SEQ ID NO: 1 - DNA, 1017 bp, Solanum lycopersicum
atggagagggactttatgggattgaatatcaaagattctttacttgtagtcaaggatgaacctgttgaaagctcaaaagactctgggtttcgctggccaatgtcgagcaaggttggtgtacctcatttcatgtccttgaactctgctcaagatgagaacaccttcaaagctctatctgccacagatggagtcgatgctggtctcaaacgtcagcctggtgaactccagaatgtgcatgcaatgcatcttccatatgatgttaagatgcttccatttaacatgaacaacccctcctacaagactcattttggtggtattggccagatgaagcaagttcttggtggaattcctgttacagctcctcattcaatgcttccatcgcgtggctctgtggctggaacaaccgaaccttggtttaattccaagggttctgcagcacctgctcaactgaccatcttctatggtgggatggtcaatgtcttcgaggatatctcccctgagaaggcacaggctattatgtttttggctggacatggctgtgctccacctaatgtggtgcagccaaggtttcaacttcaggcatctgcatcgaaacctgctgctgcagatggtgtttgtgtgaaccaaaccccaaacatgctgcctgcctcgggtctttctagcactatgtccgtttcttcccatcccattggtcaatctgatggcagttctggaaacaaagatgacatgaagatgtctaaaactgcaaacatttcagtgactccccatgtcaaattggacacttcaaagattgtgacatcactaggacctgttggggcgactaccataatgacagcagcggttccacaagctaggaaagcatctttggctcgttttctggagaagcgcaaggaaagggtgatgaacttagcaccatatggcctcagcaagaaatcgcctgagtgctccacccccgagtctaatggagttggtttctctgcaacttccactcctctgttagccggtaaggagacctag

SEQ ID NO: 2 - protein, 338 aa, Solanum lycopersicum
MERDFMGLNIKDSLLVVKDEPVESSKDSGFRWPMSSKVGVPHFMSLNSAQDENTFKALSATDGVDAGLKRQPGELQNVHAMHLPYDVKMLPFNMNNPSYKTHFGGIGQMKQVLGGIPVTAPHSMLPSRGSVAGTTEPWFNSKGSAAPAQLTIFYGGMVNVFEDISPEKAQAIMFLAGHGCAPPNVVQPRFQLQASASKPAAADGVCVNQTPNMLPASGLSSTMSVSSHPIGQSDGSSGNKDDMKMSKTANISVTPHVKLDTSKIVTSLGPVGATTIMTAAVPQARKASLARFLEKRKERVMNLAPYGLSKKSPECSTPESNGVGFSATSTPLLAGKET

SEQ ID NO: 3 - DNA, 1059 bp, Arabidopsis thaliana
atggagagagattttctcgggttgggttcgaaaaattctccgatcactgtcaaggaggaaaccagcgaaagctctagagattcagctcccaacagaggaatgaactggtctttctcaaacaaagtatcagcttcttcttctcagtttctatccttcaggccaactcaagaagatagacatagaaagtctggaaattatcatcttcctcactctggttccttcatgccatcatcagtagctgatgtttatgattcaacccgcaaagctccttacagttctgtacagggagtgaggatgttccctaattccaatcaacacgaagaaactaacgcagtttccatgtcgatgccgggtttccagtctcatcattatgcaccaggaggaagaagcttcatgaacaataacaataactcacaacctttggtaggagttcctatcatggcacctccaatttcaatccttcctcctccaggttccattgtagggactactgatattagatcttcttccaagccaataggttcacctgcgcagttgacgatcttttatgccggttcagtttgtgtttacgatgacatatctcctgaaaaggcaaaggcgataatgttgctagctgggaacggttcctctatgcctcaagtcttttcgccgcctcaaactcatcaacaagtggtccatcatactcgtgcctctgtcgattcttcagctatgcctcctagcttcatgcctacaatatcttatcttagccctgaagctggaagtagcacaaacggactcggagccacaaaagcgacaagaggcttgacgtcaacatatcacaacaaccaagctaatggatccaatattaactgcccagtaccagtttcttgttctaccaatgtaatggctccaacagtggcattacctctggctcgcaaagcatccctggctaggtttttagagaaacgcaaagaaagggtcacgagcgtatccccatattgcttagacaagaagtcatcgacagattgtcgcagatcaatgtctgaatgcattagttcttctctcagctctgcaacctaa

SEQ ID NO: 4 - protein, 352 aa, Arabidopsis thaliana
MERDFLGLGSKNSPITVKEETSESSRDSAPNRGMNWSFSNKVSASSSQFLSFRPTQEDRHRKSGNYHLPHSGSFMPSSVADVYDSTRKAPYSSVQGVRMFPNSNQHEETNAVSMSMPGFQSHHYAPGGRSFMNNNNNSQPLVGVPIMAPPISILPPPGSIVGTTDIRSSSKPIGSPAQLTIFYAGSVCVYDDISPEKAKAIMLLAGNGSSMPQVFSPPQTHQQVVHHTRASVDSSAMPPSFMPTISYLSPEAGSSTNGLGATKATRGLTSTYHNNQANGSNINCPVPVSCSTNVMAPTVALPLARKASLARFLEKRKERVTSVSPYCLDKKSSTDCRRSMSECISSSLSSAT

SEQ ID NO: 5 - DNA, 1008 bp, Brassica napus
atggagagagattttctcgggctgggttcgaaaaattcgccgatcactgtgaaggaggaaacaagcgaaagctccagagattcagctcccaatagaggaatgaactggtcattctcaaagaaaggctctgctgcttcttctcagtttctatctttcaggccatctcaagatgacagacatagaaagcctggaaactatcatctgactcactctggttccttcatgccatcatcagtagcagatggttatgattctaaccggaacactccttacagttctgtacagggagccaggatgttccctaactcccatcaacagcaagaatctatcacagtttccatggccaggccgggtctccagtctcattatccaccaggaggaaaaagcttcatgagcagtggcataaactcacaaccttttgtaggagttccaatcatggcacctccaatctcagtccttcctgctccaggttccattgtagggacaactgatattagatcttcttccaagccattaggatcaccagctcagttgaccgtcttttatgccggttcagtttgtgtttatgatgacatatctcctgataaggccaaggcgataatgttgctagctggaaacggttcctctatgcctcaagccttcacaccacctcaaactcatcaacaggtggtccaccatgctcgtgcctctgttgattcttcagctgtgcctcctagcttcatgcctacagcctcttatcttagccatgaaggtggaagtagcacatacggactcggagcagtaaaagcaacgacaggctttacatcaacataccacaacaaccaaactgtaaagcctcaaacagtggctttacctcaggctcgcaaagcatctctggctaggtttttagagaaacgcaaagaaagggtcacaagtgcatcgccatattgcttggacaagaagtcaccaacagattgtcgtacaccaatatctgaatgcataagttcgtcattcagctctgcaacctaa

SEQ ID NO: 6 - protein, 335 aa, Brassica napus
MERDFLGLGSKNSPITVKEETSESSRDSAPNRGMNWSFSKKGSAASSQFLSFRPSQDDRHRKPGNYHLTHSGSFMPSSVADGYDSNRNTPYSSVQGARMFPNSHQQQESITVSMARPGLQSHYPPGGKSFMSSGINSQPFVGVPIMAPPISVLPAPGSIVGTTDIRSSSKPLGSPAQLTVFYAGSVCVYDDISPDKAKAIMLLAGNGSSMPQAFTPPQTHQQVVHHARASVDSSAVPPSFMPTASYLSHEGGSSTYGLGAVKATTGFTSTYHNNQTVKPQTVALPQARKASLARFLEKRKERVTSASPYCLDKKSPTDCRTPISECISSSFSSAT

SEQ ID NO: 7 - DNA, 1116 bp, Glycine max
atggagagagatttcatgggtctcaacttgaaagaaccactagctgtggtgaaggaggagatgaacaatgatggctgcaaaaactctggcttcaaaaaaggtcggattgcacagtggccattctcgaacaaagtatctgcccttccacatttgatgtctttcaaggcttctcaagatgataagactaagaatacagtgtctgataccttatcatcttctgggtttatgtctatcttaagtcaagaagcatttgacactagtcagaaacgctctgctggtgaaccccagaagtctttcaatcatgatgggcaaggtgaccttcatttttcgctgacttcatatcctgtacaacatgatgtgaatcatcctcatgatgtgaagatgttttcagttccaaatcaagcaatttcagtttccttggggaatccattcctgaagaatcattttgcagctgctggtcagaagccgttacttgggggaatacctgttaccacatctcattcagttcttccctctgctgttgctgttgctggaatgaccgaatcatgtaacagtgtgaaaccatctgctcaacttaccatcttctatgctggtactgtcaatatctttgatgatatctccgctgagaaggcacaagctatcatgttgttggctggcaatagcttatctgcagcttctaacatggcacagccaaatgttcaggtgcctatctcgaagttgggtgctggtgctggtgtgcctgtgagtcaacctgcaaatacatcacctggctctggtctttcaagtcctttatctgtttcttcacataccggtgtacagtcagggagtggcttaactagcactgatgaatttctggctgctaaaacaactggagttcccaacactcctatttgcaatgtggagcctccaaaggtagtcagtgcaaccactatgttgacatcagctgtacctcaggcccggaaagcatccttggctcgatttttagaaaaacgcaaagaaagggtgatgagtgcagcaccatacaacctcaacaagaagtctgaagagtgtgccactgcagaatacgctggtgttaacttttctgccactaacactgttttggccaagcaaggatag

SEQ ID NO: 8 - protein, 371 aa, Glycine max
MERDFMGLNLKEPLAVVKEEMNNDGCKNSGFKKGRIAQWPFSNKVSALPHLMSFKASQDDKTKNTVSDTLSSSGFMSILSQEAFDTSQKRSAGEPQKSFNHDGQGDLHFSLTSYPVQHDVNHPHDVKMFSVPNQAISVSLGNPFLKNHFAAAGQKPLLGGIPVTTSHSVLPSAVAVAGMTESCNSVKPSAQLTIFYAGTVNIFDDISAEKAQAIMLLAGNSLSAASNMAQPNVQVPISKLGAGAGVPVSQPANTSPGSGLSSPLSVSSHTGVQSGSGLTSTDEFLAAKTTGVPNTPICNVEPPKVVSATTMLTSAVPQARKASLARFLEKRKERVMSAAPYNLNKKSEECATAEYAGVNFSATNTVLAKQG

SEQ ID NO: 9 - DNA, 1110 bp, Glycine max
atggagagagatttcatgggtctcaactcaaaagaacctcttgctgtggtgaaggaggagatgcacgtttatggcttcgaagactctggcttcacaaagggtcggattgcacagtggccattctcgaacaaagtatctgcccttccacatttgatgtctttcaaggcttctcaagatgataagactaagaagatagtgtctgatcccttaacatctgcagggtttatgtctatcttaagtcaagaagcatttgactctagtcagaaacgctgtgctggtgaaccccagaagtctttcaatcacgatgggcaaggtcgccttcatttttcgctgactccatatcctgtacaacatgatgtgaactctgtgaatcgtcctcatgatgtgaagatgctttcagttcccaatcaagcaatttcactttccttggggaatccattcctgaagaatgattttgcaactgctggtcagaagctgttacttgggggaatacctgttaccacgcctcattctgttcttccctctgctgttgctgttgctggaatgaccgaatcatgtaacactgtgaaaccatctgcgccttctgctcaacttaccatcttctatgctggtactgtcaatgtctttgatgatatctccgctgagaaggcacaagctatcatgttgttggctggcaatagcttatctgcaggttctaacatggcacagccaaaagttcaggtgcttgtctcgaagttggctgttggtgatggtgtgcctgtgagtcaacctgcaaatacatcacctggctctggtctttcaagtcctttatctgtttcttcacataccggcatacagtcagggagtggctcaactagtactgataaaacaactggagttcccaccactcctgtttgcaatgtggagcctccaaagatagtcagtgcaaccactatgttgacatcagctgtacctcaggcccggaaagcatccttggctcgatttttagaaaaacgcaaagaaaggttagtttggatgcaatatttttctgggtgggtgttatctgatacaatttatatttctccaaaaaaggaaggtgtagtagttatcatccattggttgacaacataa

SEQ ID NO: 10 - protein, 369 aa, Glycine max
MERDFMGLNSKEPLAVVKEEMHVYGFEDSGFTKGRIAQWPFSNKVSALPHLMSFKASQDDKTKKIVSDPLTSAGFMSILSQEAFDSSQKRCAGEPQKSFNHDGQGRLHFSLTPYPVQHDVNSVNRPHDVKMLSVPNQAISLSLGNPFLKNDFATAGQKLLLGGIPVTTPHSVLPSAVAVAGMTESCNTVKPSAPSAQLTIFYAGTVNVFDDISAEKAQAIMLLAGNSLSAGSNMAQPKVQVLVSKLAVGDGVPVSQPANTSPGSGLSSPLSVSSHTGIQSGSGSTSTDKTTGVPTTPVCNVEPPKIVSATTMLTSAVPQARKASLARFLEKRKERLVWMQYFSGWVLSDTIYISPKKEGVVVIIHWLTT

SEQ ID NO: 11 - DNA, 1161 bp, Glycine max
atggagagggaattttttggcttgagttccaaaaatggtgcatggactactatgaaagatgatgctgtcaacaaatcaagagaccaagtgaggagttcaggaatgcagtggtcattcccaaacaaggtctctgcccttcctcaattcctgtctttcaagaccaatcaggaagacaagcctagaaagactattcttgagccactagcttcatctggatatatggccatgtcaactcaatatgcttttgactctaaccaaaaatcattcttgggtttgaccaacagaaatttgtccataagcaagcatgctgcagggaacaaacaaggaatgacagtttatcctctacaatgttgtgatgcacagtcagaggaagcaagaatattttcagtgtccaaccaatcaaatcaagtgagtcctgttcttcaatctaatcttgcctctaccggactgaacatggtcaattcagtcataaaaccacaaccttttggttccaaatcctctggcacacctctatctattcttccatcaataggttccattgttggatctactgacttaaggaataattccaaatcctccaccatgcctactcagctcacgattttctatgctggttctgtgtgtgtttatgatgacatttctccagagaaggccaaggctatcatgttaatggctgggaatggttatactccaactgagaaaatggaacttcccacagtgaaattacagccagcaatttctattccctccaaagatgatggtttcatgataagccaatcctatccaccctcaacctttccaacccctctcccattgacctctcatgtcaattctcagccaggaggaggatcttctagcaacaaagaaatttcaataataagacaagtaggaccttcaactgctcctactaaccatttggaatcacccattattggttctataggatctgcatctaaagaaaaggctcagccagtttgcttgcctcaggcacgtaaagcatccttggctcggtttttggagaagagaaagggaaggatgatgagaacatcgccatacttatatatgagcaagaaatcacctgaatgcagctcttctggatcagacagtgtcagtttctccttgaacttctctggatcctgttcactaccagccaccaactag

SEQ ID NO: 12 - protein, 386 aa, Glycine max
MEREFFGLSSKNGAWTTMKDDAVNKSRDQVRSSGMQWSFPNKVSALPQFLSFKTNQEDKPRKTILEPLASSGYMAMSTQYAFDSNQKSFLGLTNRNLSISKHAAGNKQGMTVYPLQCCDAQSEEARIFSVSNQSNQVSPVLQSNLASTGLNMVNSVIKPQPFGSKSSGTPLSILPSIGSIVGSTDLRNNSKSSTMPTQLTIFYAGSVCVYDDISPEKAKAIMLMAGNGYTPTEKMELPTVKLQPAISIPSKDDGFMISQSYPPSTFPTPLPLTSHVNSQPGGGSSSNKEISIIRQVGPSTAPTNHLESPIIGSIGSASKEKAQPVCLPQARKASLARFLEKRKGRMMRTSPYLYMSKKSPECSSSGSDSVSFSLNFSGSCSLPATN

SEQ ID NO: 13 - DNA, 1272 bp, Hordeum vulgare
atggagagggacttcctgggcgccataggccacgagcagcagcagctgctgatgcagcagcagcagcagcgccagcgcgccgccgccgaggacgacgccgccagaaaggagtcagcttactttgggggaggaggagtgccgcccatggactggtccttcgctggcagggccggggccgcgccggcggtcatgtctctcaggtcggcggcgagggaagagcagcagcagcagcagggcgagctcgccttctccaagcagcaggcctcgcgtgtcctcactccacagagatcgtttggcgctgagaaccatggcagcgtgcagtacgccgccgccgcgcgtgcggcttacggtgggcagcctccacagcagcagcatgctcctaatggtgctagggtgatcccaatgtcctcgccgttcaaccccaacaatcccatgttcagggttcagagttcgcctaacctccccaatggcgttgctgctgggagcccgttcaaacagccgcctttcgcgatgaacaatgcggtcgctgcttccaccgttggtgtgtacaaatcaagggacatgccgaagccaaagacagcgcaattaaccatcttctacgctggttctgtcaatgtattcaacaacgtctcagcagaaaaggctcaggaactcatgttcttagctagcagaggatctcttccagctgcacccagtactgttactcgcagcccagatgcaacctttttcactccggcaaaactcgcagcacctgagctttcacctgcaaagcagatgctacctcagatgccacaacgtgtttcgcctcctttgtcaggcatttccaaaccgatctccatggtgtcccaagctgcatgcgtccccaagagcgcctctagctccaacattgactcgacagcgccaaaatcttcaggccagttggttgtgcctcccacgagtcagccttcgtcgtccactcatcctgtgacactagcctccaccactgctgcaagtattatgccaagagctgttcctcaagcccggaaggcgtcccttgcccgattcttggagaaaaggaaagaaagagtgacaactacggcgccgtatccatcagccaagagcccgatggagagcagcgacacggtcggaagcgccaacgacaacaacagcaagtcctcatcatgcacagagatcgccttctcaagcaaccatgaggagtcgctgcgtctaggcggccggcccaggaacatcagctttagcggggagtccccgagtacaaaactacacatctga

SEQ ID NO: 14 - protein, 423 aa, Hordeum vulgare
MERDFLGAIGHEQQQLLMQQQQQRQRAAAEDDAARKESAYFGGGGVPPMDWSFAGRAGAAPAVMSLRSAAREEQQQQQGELAFSKQQASRVLTPQRSFGAENHGSVQYAAAARAAYGGQPPQQQHAPNGARVIPMSSPFNPNNPMFRVQSSPNLPNGVAAGSPFKQPPFAMNNAVAASTVGVYKSRDMPKPKTAQLTIFYAGSVNVFNNVSAEKAQELMFLASRGSLPAAPSTVTRSPDATFFTPAKLAAPELSPAKQMLPQMPQRVSPPLSGISKPISMVSQAACVPKSASSSNIDSTAPKSSGQLVVPPTSQPSSSTHPVTLASTTAASIMPRAVPQARKASLARFLEKRKERVTTTAPYPSAKSPMESSDTVGSANDNNSKSSSCTEIAFSSNHEESLRLGGRPRNISFSGESPSTKLHI

SEQ ID NO: 15 - DNA, 1290 bp, Medicago truncatula
atggaaagagaattccttggcttcagttccaaaaatagtccatggactaccatgaaagaagatgcttccaacaaaccaaaagaccaagttaggagttcaggaatgcagtggtcattttcaaataaggtttcaaaccttcctcaattcatgtcattcaagaataacactcatgaagataggtcaagaaacaatgttatggatccagtagcttcatctggatatatgactatttcaactaaagatgcttttgattctaatcagaaatcattcttgggtgtgacacaggaaaatttggccataaagcaagtaggaaacaagcatggaattacaatttatcctatacaaagttctgatgcacaatcagtttgcaatcaagaagcaagaacaatttcagtttcaaaccaatctaatcatgttataactggaatcaacatggttaattcagttacaaactctcaaacttttggttcaaaatcctctgccacacctttatctgttcttccatcaaaaggtcccatagttggctctactgacttaaggagtaggaattgttccaaatccaatggtactacacctgctcagttgaccatattttatggtggtacagtttgcgtgtatgatgacatctctcctgagaaggccaaggcaatcatgttactagctggaaatggaactaaaatgcagcaagaaatctctattccttccaaaaaggataatttcattataagccaaccctatccttcaccattgccaagccctattccaatgacctctcatgcaagtactcaaccaaggggaggttcaagtagcaacaatgaagttacaataataagaactttaggacattcaattgccaagtcctctcacaatgacctatctcatctctcatcattgccaagtcctctcccaatgacctctcatgcaagttcttatcctaagggaggttcaagtagcaacaatgaagttacaataataagatctttaggaccttcaaatgcccctactaaccatttggaatctcctattgttgctacttctgtaggattaacacctacaaatgtgattcaaccagttggcttgcctcaagcgcgaaaagcatcgctaactcggtttttggagaagcgaaaggaaagggcaatgagcacatcaccatactatatgagcaaaatatcacctgaatgcagcactggatcagacaatgctagtttctccattgatttctctggttcaagtactcaaccaccaaccaatttgcctttaagaagaacatgtatggaagtgattagataa

SEQ ID NO: 16 - protein, 429 aa, Medicago truncatula
MEREFLGFSSKNSPWTTMKEDASNKPKDQVRSSGMQWSFSNKVSNLPQFMSFKNNTHEDRSRNNVMDPVASSGYMTISTKDAFDSNQKSFLGVTQENLAIKQVGNKHGITIYPIQSSDAQSVCNQEARTISVSNQSNHVITGINMVNSVTNSQTFGSKSSATPLSVLPSKGPIVGSTDLRSRNCSKSNGTTPAQLTIFYGGTVCVYDDISPEKAKAIMLLAGNGTKMQQEISIPSKKDNFIISQPYPSPLPSPIPMTSHASTQPRGGSSSNNEVTIIRTLGHSIAKSSHNDLSHLSSLPSPLPMTSHASSYPKGGSSSNNEVTIIRSLGPSNAPTNHLESPIVATSVGLTPTNVIQPVGLPQARKASLTRFLEKRKERAMSTSPYYMSKISPECSTGSDNASFSIDFSGSSTQPPTNLPLRRTCMEVIR

SEQ ID NO: 17 - DNA, 903 bp, Medicago truncatula
atggaaagagattttttgagtctttgctcaaaagaatcatcacctgagattaacaatgaagggtcaaaaaactcaggtttttcaaatgtttcagcagtaaaatggcctttcttgaacaaagtcgctgttcattcatatttgacgccttttaaagtttctgaagacgataaggctaaaatgatatcttctggtttcatacagaatataaatggtgctaatgcgaagcaatcactacttggtggattaccggttaccgcacctcattcagttcttccgatcgttggtactgttgccggtttggttgaaccatgtgagaaaccatctgcacctgctcctcaacttaccatgttttatggcggtactgtgaacatcttcaatgatatcactcctgagaaggcacaagccatcatgttgttggctggaagtggcttatctgcagcttcaaacagggctcaacctgaagttcaggcatctagctcgaaattcgcatcaggtgatgatggtttgcctataagtccacctgtatacataccaccctgctctggtatttcaagtcctttatctgtttcttcacacactggtccacagccagggagtggctcaagtagcagtgatgagtttatggctgctaaaacatctagaggccctactcctaccacatctgcttgcaaagttgtgactccaaaagtagtcaatgcaaccaccatgattccatcagctataccgcaagctcgcaaagcatcattggctcgatttttggagaagcgcaaggaaagggtgatgagtacagcaccatataacctcaacaagaaatctgaggatgcacaaatgccgaattcaatgggtgctaacatctctgcgaccactggtactgctaatatgctggtagcaaaccaaggataa

SEQ ID NO: 18 - protein, 300 aa, Medicago truncatula
MERDFLSLCSKESSPEINNEGSKNSGFSNVSAVKWPFLNKVAVHSYLTPFKVSEDDKAKMISSGFIQNINGANAKQSLLGGLPVTAPHSVLPIVGTVAGLVEPCEKPSAPAPQLTMFYGGTVNIFNDITPEKAQAIMLLAGSGLSAASNRAQPEVQASSSKFASGDDGLPISPPVYIPPCSGISSPLSVSSHTGPQPGSGSSSSDEFMAAKTSRGPTPTTSACKVVTPKVVNATTMIPSAIPQARKASLARFLEKRKERVMSTAPYNLNKKSEDAQMPNSMGANISATTGTANMLVANQG

SEQ ID NO: 19 - DNA, 918 bp, Populus trichocarpa
atggaaagagattttttgggtttgagttcaagagaaccactggctgtggttaaggaggaggttcagggatgcagtggcccttctctaacaaggtctccacccctcgtcactccacggctgaaatccagacaaggtgggactcatttttcactgactgcttatcctgtgcaacacgatgtgcattctatgcatcatcctcatgatgtgaagatgtttccagtctccaatcatgcaattccaatttctatgggcaaccatttcttcaagaatcattatccagcaactggtcagaatatggcggggactaccacgaagccacagttgctaggaggaattcctgtcacagctccacattcaattcttccaatggttggttctgttgctggggtaacagactcaagtgtcagggcatctgggtctcctgctcaattgaccatcttttatgctggctcagtcaatgtctatgatgatatatcccctgagaaggctcaggcaatcatgttcttggctggaaatgggccttccatttcatctaacttagcacagccaatagtccaagtccaggcatctagctctaagccagcagcagctgatcttagtcctgtgaaccaacctataatgtccactccaccatgctctcgtctctcaagcccatcacatactggtgcccaatcagggagtgggtcaactagtactgaggaaatcatggcaactaaaaccacaggagctttgaccactcatgttaccaaaccagagcatacaaagacagcaaatgtagtgggatctgttactacaaccaccatgataccatctgtccctcaggctcgaaaagcatcattggctcggtttttagagaagcgcaaggaaagtgatgttatggatgcaacgattagctcaactaaatcgtccggctcctga

SEQ ID NO: 20 - protein, 305 aa, Populus trichocarpa
MERDFLGLSSREPLAVVKEEVQGCSGPSLTRSPPLVTPRLKSRQGGTHFSLTAYPVQHDVHSMHHPHDVKMFPVSNHAIPISMGNHFFKNHYPATGQNMAGTTTKPQLLGGIPVTAPHSILPMVGSVAGVTDSSVRASGSPAQLTIFYAGSVNVYDDISPEKAQAIMFLAGNGPSISSNLAQPIVQVQASSSKPAAADLSPVNQPIMSTPPCSRLSSPSHTGAQSGSGSTSTEEIMATKTTGALTTHVTKPEHTKTANVVGSVTTTTMIPSVPQARKASLARFLEKRKESDVMDATISSTKSSGS

SEQ ID NO: 21 - DNA, 1287 bp, Populus trichocarpa
atggaaagagattttttgggtttgagttcaaagaaaccgtcggctgtggtgaaggaggagattagctctgatgggtgtaaagatataggatttactaagggttcagggatgcattggcccttctccaacaaggtctctacccttcataacttgatgtctttcaaggctgctcaagaagataagaccaaaacgattgaatctgatgccttggtgtcctctggattcatgtctgtcttaagtgcagacgcatgtgatcctggtcaaaaacgttctgctgctgaaatccagaaattattcaatctcaatagacaaggtaagactcatttttcaccaactgcttttcctgcgcaacatgatgtgcactctgtgcaccatcctcatgatatgaagatgtttccggtcgccaatcatgcaatttcaatctctacgggcaaccctttcttcaacaatcattatccagccactggtcagaatatgtttgggactaccatgaagccacagttgcttggaggatttcctgtcacagctccacattcaattcttcccatggttggtcctgttgctggggtaacagactcaagtgtcaaagcatatgggtctcctgctcaattgaccatcttttatgctggcgcagtcaacgtctatgatgatatatcccctgagaagatggcaatcctaaatctggtttctttacggaatcctatccaggctcaggcaatcatgttcttggctggaaatgggtcttccatttcatccaaatcggcacagccaaaagtccaagtccaggcatttagctcaaagccagcagcagctgatgttagtcccgtgaaccaacctatcatgtctactccaccatgctctagtctctcaagcccatcacatacaggtgcccagtcagggagtgggtcaactagtaccgaggaaatcatggcaaccaaaaccactggacctgtgaccattcctgttattaaaccagatcatccaaagacaggaaatgtagtgggatctgttgctacaaccaccatgataccatctggtatgatctctcttttctctcttgaaagtggtgttctaatatatattgcctccatgaagatgtttttttttttttttttatcttcatctgcaatgtataatcaatgcccaatctctgtcactgcagtccctcaggctcgaaaagcatccctggctcggtttttagagaaacgcaaggaaagagcgacgaatgcagagccatacaacctcagcaagaaatctccagattttgccaaccccgaaccctactaa

SEQ ID NO: 22 - protein, 428 aa, Populus trichocarpa
MERDFLGLSSKKPSAVVKEEISSDGCKDIGFTKGSGMHWPFSNKVSTLHNLMSFKAAQEDKTKTIESDALVSSGFMSVLSADACDPGQKRSAAEIQKLFNLNRQGKTHFSPTAFPAQHDVHSVHHPHDMKMFPVANHAISISTGNPFFNNHYPATGQNMFGTTMKPQLLGGFPVTAPHSILPMVGPVAGVTDSSVKAYGSPAQLTIFYAGAVNVYDDISPEKMAILNLVSLRNPIQAQAIMFLAGNGSSISSKSAQPKVQVQAFSSKPAAADVSPVNQPIMSTPPCSSLSSPSHTGAQSGSGSTSTEEIMATKTTGPVTIPVIKPDHPKTGNVVGSVATTTMIPSGMISLFSLESGVLIYIASMKMFFFFFLSSSAMYNQCPISVTAVPQARKASLARFLEKRKERATNAEPYNLSKKSPDFANPEPY

SEQ ID NO: 23 - DNA, 1191 bp, Populus trichocarpa
atggagagagattttctgggtctgggttcgaaaaacaatcctgttactatcaaagaagaggccaccgatactcctcttaaggattctgtgcccatgagaggttcagggatgcagtggtctttttcaaacaaggtttctgccattcctcaattcttgtcgttcaagtcttccatggaagataaaccaagaaaggctgttcatgatcccatggcatcatcatcctctggctatatgtcaatttcaactgctgatgcttttgattctaaccagaaatcatactctgccttgattcagaaaaatatggctcttgataaacaagctggaaaccattatgctatgacaacctatggtaaacagcatttcgatgcctattttgctaatcgcccacaggatatgaggatgtttccaatctccagccaacaaaatcaaacaatcaacgtttctatgagctcccccattctgcagtccctttttcctcccactggacacagcatgattacttctaattcaatagtctcaaaacctctcggaggagttccagtcataacccctgcttctgctcttcctaccccgagttccgtcattggcaccactgatcttagggatgttgctaaatcctctggagcacctgcccagttgaccatattctacgctggttcagtgagtgtttatgatgatgtttctcctgagaaggcacaggccattatgcttttggctggaaatggtggctcttctgggactcagaataagccaatctccacgcctcaagcacaggcacaagcaccaattcctggaccacctgtaggtgatatttttgttgggaacaaaatcaacactacagctccatgctcaggcatgccaagccctatttctgtgacctctagtagcaccaacgatttagcaatagttaagccagtagtaaatttagcaccttctgttaaacatatagagcccaccaagccagctagttcagtaggacctacttctgccactctagttccagcagtggctgtacctcaggctcgtaaagcatcgttggctcggtttttggagaagcgcaaggaaagggtgatgcaaacatcgccctataatggaagcaagaagtctcccgagggtggtgcccatagatttgatggtatgagtttatctatgagcacctctagctctttccctctcccagccagcaattag

SEQ ID NO: 24 - protein, 396 aa, Populus trichocarpa
MERDFLGLGSKNNPVTIKEEATDTPLKDSVPMRGSGMQWSFSNKVSAIPQFLSFKSSMEDKPRKAVHDPMASSSSGYMSISTADAFDSNQKSYSALIQKNMALDKQAGNHYAMTTYGKQHFDAYFANRPQDMRMFPISSQQNQTINVSMSSPILQSLFPPTGHSMITSNSIVSKPLGGVPVITPASALPTPSSVIGTTDLRDVAKSSGAPAQLTIFYAGSVSVYDDVSPEKAQAIMLLAGNGGSSGTQNKPISTPQAQAQAPIPGPPVGDIFVGNKINTTAPCSGMPSPISVTSSSTNDLAIVKPVVNLAPSVKHIEPTKPASSVGPTSATLVPAVAVPQARKASLARFLEKRKERVMQTSPYNGSKKSPEGGAHRFDGMSLSMSTSSSFPLPASN

SEQ ID NO: 25 - DNA, 1017 bp, Populus trichocarpa
atggaaagagattttttgggtttgagttcaaagaaaccgtcggctgtggtgaaggaggagattagctctgatgggtgtaaagatataggatttactaagggttcagggatgcattggcccttctccaacaaggtctctacccttcataacttgatgtctttcaaggttgctcaagaagataagaccaaaacgattgaatctgatgccttggtgtcctctggattcatgtctgtcttaagtgcagacgcatgtgatcctggtcaaaaacgttctgctgctgaaatccagatgtttccggtcgccaatcatgcaatttcaatctctacgggcaaccctttcttcaacaatcattatccagccactggtcagaatatgtttgggactaccatgaagccacagttgcttggaggatttcctgtcacagctccacattcaattcttcccatggttggtcctgttgctggggtaacagactcaagtgtcaaagcatatgggtctcctgctcaattgaccatcttttatgctggcgcagtcaacgtctatgatgatatatcccctgagaaggctcaggcaatcatgttcttggctggaaatgggtcttccatttcatccaaatcggcacagccaaaagtccaagtccaggcatttagctcaaagccagcagcagctgatgttagtcccgtgaaccaacctatcatgtctactccaccatgctctagtctctcaagcccatcacatacaggtgcccagtcagggagtgggtcaactagtaccgaggaaatcatggcaaccaaaaccactggacctgtgaccattcctgttattaaaccagatcatccaaagacaggaaatgtagtgggatctgttgctacaaccaccatgataccatctgtccctcaggctcgaaaagcatccctggctcggtttttagagaaacgcaaggaaagagcgacgaatgcagagccatacaacctcagcaagaaatctccagattttgccaaccccgaaccctactaa

SEQ ID NO: 26 - protein, 338 aa, Populus trichocarpa
MERDFLGLSSKKPSAVVKEEISSDGCKDIGFTKGSGMHWPFSNKVSTLHNLMSFKVAQEDKTKTIESDALVSSGFMSVLSADACDPGQKRSAAEIQMFPVANHAISISTGNPFFNNHYPATGQNMFGTTMKPQLLGGFPVTAPHSILPMVGPVAGVTDSSVKAYGSPAQLTIFYAGAVNVYDDISPEKAQAIMFLAGNGSSISSKSAQPKVQVQAFSSKPAAADVSPVNQPIMSTPPCSSLSSPSHTGAQSGSGSTSTEEIMATKTTGPVTIPVIKPDHPKTGNVVGSVATTTMIPSVPQARKASLARFLEKRKERATNAEPYNLSKKSPDFANPEPY

SEQ ID NO: 27 - DNA, 1173 bp, Solanum lycopersicum
atggagagagatttcatggggttgactgtgaagcaagaagttcttgaagaacctatagatccagcacctttaagaagttcagcaatgcagtggtcattcacgaacaacgtcactgctcatcctcaatacctttctttcaagagtgctccagaggataaaccgaaaattggttttgattctcttgcatcaactggattggtgactataaccacaactgaagctgttgactcgagtcatcggacatactctgatgtcacacagaaaaatatgatgcttgaaagacaaggtggaacacattacacaacgacaactttctctcctcatcactatgatgcacactctatgcatcgatctcacggagtcagagtgctcccacttgcgagcccaactaatcagatttctgtatctatgactatgcctggtcataagtcttttatttctcctgttggacagaatctgataactactgtaaatcaactccctggtgctggagctctggttgttagccccatttcagctgttccgtctagcagcattgtcgtgggcaccactgatttaaggggtgctcccaaaactcccccaggtcctgcccagttgaccatcttttatggtggttctgtctgtgtgtatgacaatgtttcaccggaaaaggctcaagctattatgttacttgctggaaatgcaccacctgttacaccaaatgcaacatctactctatctccagttcaggcacctatacctaagtcctcggccatagactcttttgttgtaaatcagtgccgtaatacaacacctacacttgccagccccatttctataacatcccatggtggcgcgcaagctgccaaagtgtctactactacaaatggagtaactattatcaaatcaataggagttcttccatctccttctcttaaagccaagccttccaaagttaccagttctgtaggatcttttcctgcctccctcgttccatcagctgtgcctcaggcgcgcaaggcatcattggctcgattcttggagaagcgcaaggaaagggtaataagtgcatcaccttatcctctcaacagcaagcaatccccagaatgtagcactcctgaacttggaagtagaagcctctctatgaattcttcaggctcttgtcctccccacataatcagtttggtcaagtag

SEQ ID NO: 28 - protein, 390 aa, Solanum lycopersicum
MERDFMGLTVKQEVLEEPIDPAPLRSSAMQWSFTNNVTAHPQYLSFKSAPEDKPKIGFDSLASTGLVTITTTEAVDSSHRTYSDVTQKNMMLERQGGTHYTTTTFSPHHYDAHSMHRSHGVRVLPLASPTNQISVSMTMPGHKSFISPVGQNLITTVNQLPGAGALVVSPISAVPSSSIVVGTTDLRGAPKTPPGPAQLTIFYGGSVCVYDNVSPEKAQAIMLLAGNAPPVTPNATSTLSPVQAPIPKSSAIDSFVVNQCRNTTPTLASPISITSHGGAQAAKVSTTTNGVTIIKSIGVLPSPSLKAKPSKVTSSVGSFPASLVPSAVPQARKASLARFLEKRKERVISASPYPLNSKQSPECSTPELGSRSLSMNSSGSCPPHIISLVK

SEQ ID NO: 29 - DNA, 1248 bp, Triticum aestivum
atggagagggacttcctgggcaccataggccacgagcagctgcagcagcagcagcagcagcagcagcgccagcgcgccgccgccgaggacgccgccgccagaaaggagtcagcttactttgggggaggaggagtgccgcccatggattggtccttcgctggcagggccggggccgcgccggcggtcatgtccttcaggtcggcgccgagggaggagcagcggggcgagctcgcctaccccaagcagcaggcctcccgcgtcctgacgccacagagatcgtttggtgctgagagccacggcagcgtgcagtacgccgccgccgcgcgtgcggcttacggcgggcagcctccgcagcagcaccagcatgctcctaatggtgctagagtgattccaatgtcgtcgccgttcaatcccaacaatcccatgttcagggttcagagttcgcctaacctcccgaacggtgttgctgctggtagcccgttcaaacaaccgcctttcgtgatgaacaatgcggtggctgcttcgactgttggtgtctataaatcaagggacacgccgaagccaaagacagcgcaattaactatcttctatgctggttctgtcaatgtattcaacaacgtctcagcagaaaaggctcaggagcttatgttcttggctagcagaggatctcttccaaccgcacccactactgttactcgcagcccagatgcaacctttttcactccggctaaactcgccgcccctgaggcttcacctgcaaagcagatgctagctcagataccacagcgtgtttcacctcctttgccagccatttccaaaccgatgtccatcatgtctcaagctgcatgtctccccaagagcacatctagctccaacaccgattccgcagtgccaaaatcttcaggccagttggttgtgcctcccacaagtcagccctcgtcgtcgacactagcgtccaccactgcagcaagtattatgccaagagctgttcctcaagctcggaaggcatcccttgcccgattcttggagaaaaggaaagaaagggtgacgactacggcgccatatccatcagccaagagcccgatggagagcagcgacacggtcggaagcgccaacgacaacaacagcaagtcctcatcgtgcacagagatcgccttctcaagcaaccatgaagagtcgctgcgcctaggccggcccaggaacatcagctttagcggggagtccccgagtacaaaattacacatctga

SEQ ID NO: 30 - protein, 415 aa, Triticum aestivum
MERDFLGTIGHEQLQQQQQQQQRQRAAAEDAAARKESAYFGGGGVPPMDWSFAGRAGAAPAVMSFRSAPREEQRGELAYPKQQASRVLTPQRSFGAESHGSVQYAAAARAAYGGQPPQQHQHAPNGARVIPMSSPFNPNNPMFRVQSSPNLPNGVAAGSPFKQPPFVMNNAVAASTVGVYKSRDTPKPKTAQLTIFYAGSVNVFNNVSAEKAQELMFLASRGSLPTAPTTVTRSPDATFFTPAKLAAPEASPAKQMLAQIPQRVSPPLPAISKPMSIMSQAACLPKSTSSSNTDSAVPKSSGQLVVPPTSQPSSSTLASTTAASIMPRAVPQARKASLARFLEKRKERVTTTAPYPSAKSPMESSDTVGSANDNNSKSSSCTEIAFSSNHEESLRLGRPRNISFSGESPSTKLHI

SEQ ID NO: 31 - DNA, 1284 bp, Oryza sativa
atggagagggattttcttggcgcgatttggaggaaggaggaggcggccggcaagccggaggagcattcagattatcgaggaggaggaggaggcgcgtcggcgacgatgcagtggcagtttccggcgaccaaggtcggcgccgcgtcgtcggcgttcatgtccttcaggtcgtcggcggcggcggcgagggaggaggaccccaaggaggcggcggtgttcgaccgcttctccctctccgggttccgcccgccgccgcgcccgtcccccggtgacgccttcgacggcgctgccgccatgaagcagcggcagtttggattcaacggccggcagcagtacgccgccgcggcgcagcacggccaccgggagcagggcgtggactcctacggcgtcgcggcgccgcaccatttcccgtcgccgtcgccgtcgccgcgccaccccgtgccgttcggccacgcgaaccccatgctccgggttcatagcctccccaacgtcgccggcgggagcccctacaggaaccaatccttctccgtcggcaactcggtggccggctccaccgtcggcgtctacggcggcccaagggaccttcaaaatccgaaggtgacacagatgaccatattctacgatggattggtgaatgtgttcgacaacattccggtggagaaggctcaagaacttatgcttttggcaagcagggcatccattccgagtccaccgagtgcagctcgtaaatcagattcgcctatttccgctgctgcgaaacttacagtgcccgaggctttgcctgcaaggcagattgtagttcagaaaccagaggcttctgtgcctcttgtatcaggggtttcgaatccgatcaccatcgtgtcgcaagctgtgactctccccaagagcttttctagctccaacgactctgcggggccgaaatctggaggcctaccgttggctgttactcctttgagccaggcatccccgtcccagccgattccagtagcaaccacaaatgcttcggctatcatgccaagagctgtgcctcaagctcgaaaagcatctctcgcccgattcttggagaagcgaaaggaaagagtgtcaagtgttgcgccatacccatcctcaaagagtccactagagagcagtgacaccattggcagtcccagcacaccgagcaaatcatcgtgcacggacatcaccccttcgaccaacaactgcgaggactcactgtgcttaggtcagccaaggaacatcagcttcagcagccaggagccccccagcacaaagttacagatatga

SEQ ID NO: 32 - protein, 427 aa, Oryza sativa
MERDFLGAIWRKEEAAGKPEEHSDYRGGGGGASATMQWQFPATKVGAASSAFMSFRSSAAAAREEDPKEAAVFDRFSLSGFRPPPRPSPGDAFDGAAAMKQRQFGFNGRQQYAAAAQHGHREQGVDSYGVAAPHHFPSPSPSPRHPVPFGHANPMLRVHSLPNVAGGSPYRNQSFSVGNSVAGSTVGVYGGPRDLQNPKVTQMTIFYDGLVNVFDNIPVEKAQELMLLASRASIPSPPSAARKSDSPISAAAKLTVPEALPARQIVVQKPEASVPLVSGVSNPITIVSQAVTLPKSFSSSNDSAGPKSGGLPLAVTPLSQASPSQPIPVATTNASAIMPRAVPQARKASLARFLEKRKERVSSVAPYPSSKSPLESSDTIGSPSTPSKSSCTDITPSTNNCEDSLCLGQPRNISFSSQEPPSTKLQI

SEQ ID NO: 33 - DNA, 1215 bp, Zea mays
atggcaaaatctggtgcctcctttccggagtccagttggatggagagggatttcctggccgcgatcggcaaggagcagcagcacccgcacaaggaggaggcaggcgcggaggaatctgcttacttcggcggagcaggagcagcagcagcagccccggcaatggactggtccttcgctagcaagcccggcgccgccccggcgttgatgtcgttccggtcagcttcgttcccccagttctcctccttcgacggcgccaagaacccggcccctcgtatcctcacgcaccagaggtcgttcggccccgacagcacgcactacgccgccgcgcaccgcacgcagcatgcgctgaacggggctagagtcactccggtctcgtcgccgttcaaccagaacagtccgatgttcagggtccagagctcgcctagccttccgaacggtactgcgttcaagcagccgccttttgccatcaacaacaacgctgcggccagttctactgttggtttctatggaacaagggatgtggtgaggccaaagacagcacaattgacgatcttctatgctggttctgtcaacgtattcgacaacgtctcagctgagaaggctcaggagctcatgctcttagccagcagagggtctcttccaagctcagcccccgtggcccgtaagccagaagctcctattctcgctccagcaaaagtcacagcgcctgaggttttgcatgcaacacagatgctgtttcaaaaaccacaacacgtttctccaccttcgtctgccatctccaaaccaatccctggcatcttgcaagctgcaagtctccccaggagcgcctcgagctctaaccttgactccccatttccaaaatcttcagtgccatttcctgtttctcctgtaagtcaggctccgagagctcagcctgcaaccattgccgctacaactgcagcagcaataatgcctagagctgtccctcaagctagaaaggcgtcccttgctcgattcttggagaaaagaaaggaaagggtgacaactgctgcaccttacccatcagccaagagcccgatggagagcagtgacacgtttggcagtgggagcgccaacgacaagtcatcatgcacagacattgccctctcaagcaaccatgaggagtccctatgtttagggcagcccaggaacatcagcttcatccaagagtcccccagtacaaaactacagatctga

SEQ ID NO: 34 - protein, 404 aa, Zea mays
MAKSGASFPESSWMERDFLAAIGKEQQHPHKEEAGAEESAYFGGAGAAAAAPAMDWSFASKPGAAPALMSFRSASFPQFSSFDGAKNPAPRILTHQRSFGPDSTHYAAAHRTQHALNGARVTPVSSPFNQNSPMFRVQSSPSLPNGTAFKQPPFAINNNAAASSTVGFYGTRDVVRPKTAQLTIFYAGSVNVFDNVSAEKAQELMLLASRGSLPSSAPVARKPEAPILAPAKVTAPEVLHATQMLFQKPQHVSPPSSAISKPIPGILQAASLPRSASSSNLDSPFPKSSVPFPVSPVSQAPRAQPATIAATTAAAIMPRAVPQARKASLARFLEKRKERVTTAAPYPSAKSPMESSDTFGSGSANDKSSCTDIALSSNHEESLCLGQPRNISFIQESPSTKLQI

SEQ ID NO: 35 - protein, 25 aa, Artificial sequence
  motif 1-1 (TIFY)
  VARIANT (7)..(7): / replace = "Gly"
  VARIANT (9)..(9): / replace = "Met"
  VARIANT (11)..(11): / replace = "Cys"
  VARIANT (13)..(13): / replace = "Phe"
  VARIANT (14)..(14): / replace = "Glu"
  VARIANT (15)..(15): / replace = "Asn"
  VARIANT (16)..(16): / replace = "Val"
  VARIANT (18)..(18): / replace = "Ala"
  VARIANT (23)..(23): / replace = "Glu"
  VARIANT (24)..(24): / replace = "Leu"
QLTIFYAGSVNVYDDISPEKAQAIM

SEQ ID NO: 36 - protein, 25 aa, Artificial sequence
  motif 1-1 a
  VARIANT (11)..(11): / replace = "Cys"
  VARIANT (13)..(13): / replace = "Phe"
  VARIANT (15)..(15): / replace = "Asn"
  VARIANT (16)..(16): / replace = "Val"
  VARIANT (18)..(18): / replace = "Ala"
  VARIANT (23)..(23): / replace = "Glu"
  VARIANT (24)..(24): / replace = "Leu"
QLTIFYGGMVNVYEDISPEKAQAIM

SEQ ID NO: 37 - protein, 25 aa, Artificial sequence
  motif 2-1 CCT_2
  VARIANT (20)..(20): / replace = "Thr"
  VARIANT (21)..(21): / replace = "Ser" / replace = "Thr"
  VARIANT (22)..(22): / replace = "Ala" / replace = "Leu"
  VARIANT (23)..(23): / replace = "Ser"
PQARKASLARFLEKRKERVMNTAPY

SEQ ID NO: 38 - protein, 25 aa, Artificial sequence
  motif 2-1 a
  VARIANT (20)..(20): / replace = "Thr"
  VARIANT (21)..(21): / replace = "Ser" / replace = "Thr"
  VARIANT (23)..(23): / replace = "Ser"
PQARKASLARFLEKRKERVMNLAPY

SEQ ID NO: 39 - protein, 25 aa, Artificial sequence
  motif 3-1
  VARIANT (6)..(6): / replace = "Met"
  VARIANT (9)..(9): / replace = "Gly" / replace = "Ser" / replace = "Ile"
  VARIANT (10)..(10): / replace = "Ser"
  VARIANT (12)..(12): / replace = "Glu" / replace = "Asn"
  VARIANT (13)..(13): / replace = "Ser"
  VARIANT (14)..(14): / replace = "Pro"
  VARIANT (15)..(15): / replace = "Ala"
  VARIANT (16)..(16): / replace = "Thr"
  VARIANT (17)..(17): / replace = "Ile"
  VARIANT (19)..(19): / replace = "Glu"
  misc_feature (21)..(23): Xaa can be any naturally occurring amino acid
  VARIANT (24)..(24): / replace = "Asp"
  VARIANT (25)..(25): / replace = "Gly"
MERDFLGLNIKDPLLVVKDEXXXSS

SEQ ID NO: 40 - protein, 30 aa, Artificial sequence
  motif 4-1
  VARIANT (2)..(2): / replace = "Met"
  VARIANT (7)..(7): / replace = "Gly"
  VARIANT (9)..(9): / replace = "Met" / replace = "Thr" / replace = "Leu"
  VARIANT (11)..(11): / replace = "Cys" / replace = "Ser"
  VARIANT (12)..(12): / replace = "Ile"
  VARIANT (13)..(13): / replace = "Phe"
  VARIANT (14)..(14): / replace = "Glu" / replace = "Asn"
  VARIANT (15)..(15): / replace = "Asn"
  VARIANT (16)..(16): / replace = "Val"
  VARIANT (17)..(17): / replace = "Thr" / replace = "Pro"
  VARIANT (18)..(18): / replace = "Ala" / replace = "Val"
  VARIANT (19)..(19): / replace = "Asp"
  VARIANT (20)..(20): / replace = "Gln"
  VARIANT (22)..(22): / replace = "Lys"
  VARIANT (23)..(23): / replace = "Glu"
  VARIANT (24)..(24): / replace = "Leu"
  VARIANT (29)..(29): / replace = "Ser"
  VARIANT (30)..(30): / replace = "Asn" / replace = "Arg"
QLTIFYAGSVNVYDDISPEKAQAIMFLAGH

SEQ ID NO: 41 - protein, 19 aa, Artificial sequence
  motif 4-1 a
  VARIANT (2)..(2): / replace = "Met"
  VARIANT (7)..(7): / replace = "Gly"
  VARIANT (9)..(9): / replace = "Met" / replace = "Ala" / replace = "Thr" / replace = "Leu"
  VARIANT (11)..(11): / replace = "Cys" / replace = "Ser"
  VARIANT (12)..(12): / replace = "Ile"
  VARIANT (13)..(13): / replace = "Phe"
  VARIANT (14)..(14): / replace = "Glu" / replace = "Asn"
  VARIANT (15)..(15): / replace = "Asn"
  VARIANT (16)..(16): / replace = "Val"
  VARIANT (17)..(17): / replace = "Thr" / replace = "Pro"
  VARIANT (18)..(18): / replace = "Ala" / replace = "Val"
  VARIANT (19)..(19): / replace = "Asp"
QLTIFYAGSVNVYDDISPE

SEQ ID NO: 42 - protein, 11 aa, Artificial sequence
  motif 4-1 b
  VARIANT (1)..(1): / replace = "Gln"
  VARIANT (3)..(3): / replace = "Lys"
  VARIANT (4)..(4): / replace = "Glu"
  VARIANT (5)..(5): / replace = "Leu"
  VARIANT (10)..(10): / replace = "Ser"
  VARIANT (11)..(11): / replace = "Asn" / replace = "Arg"
KAQAIMFLAGH

SEQ ID NO: 43 - protein, 8 aa, Artificial sequence
  motif 5-1
RFLEKRKE

SEQ ID NO: 44 - protein, 8 aa, Artificial sequence
  motif 6-1
  VARIANT (7)..(7): / replace = "Gly"
QLTIFYAG

SEQ ID NO: 45 - protein, 8 aa, Artificial sequence
  motif 7-1
  VARIANT (6)..(6): / replace = "Met"
MERDFLGL

SEQ ID NO: 46 - DNA, 2194 bp, Oryza sativa
aatccgaaaagtttctgcaccgttttcaccccctaactaacaatatagggaacgtgtgctaaatataaaatgagaccttatatatgtagcgctgataactagaactatgcaagaaaaactcatccacctactttagtggcaatcgggctaaataaaaaagagtcgctacactagtttcgttttccttagtaattaagtgggaaaatgaaatcattattgcttagaatatacgttcacatctctgtcatgaagttaaattattcgaggtagccataattgtcatcaaactcttcttgaataaaaaaatctttctagctgaactcaatgggtaaagagagagattttttttaaaaaaatagaatgaagatattctgaacgtattggcaaagatttaaacatataattatataattttatagtttgtgcattcgtcatatcgcacatcattaaggacatgtcttactccatcccaatttttatttagtaattaaagacaattgacttatttttattatttatcttttttcgattagatgcaaggtacttacgcacacactttgtgctcatgtgcatgtgtgagtgcacctcctcaatacacgttcaactagcaacacatctctaatatcactcgcctatttaatacatttaggtagcaatatctgaattcaagcactccaccatcaccagaccacttttaataatatctaaaatacaaaaaataattttacagaatagcatgaaaagtatgaaacgaactatttaggtttttcacatacaaaaaaaaaaagaattttgctcgtgcgcgagcgccaatctcccatattgggcacacaggcaacaacagagtggctgcccacagaacaacccacaaaaaacgatgatctaacggaggacagcaagtccgcaacaaccttttaacagcaggctttgcggccaggagagaggaggagaggcaaagaaaaccaagcatcctccttctcccatctataaattcctccccccttttcccctctctatataggaggcatccaagccaagaagagggagagcaccaaggacacgcgactagcagaagccgagcgaccgccttctcgatccatatcttccggtcgagttcttggtcgatctcttccctcctccacctcctcctcacagggtatgtgcctcccttcggttgttcttggatttattgttctaggttgtgtagtacgggcgttgatgttaggaaaggggatctgtatctgtgatgattcctgttcttggatttgggatagaggggttcttgatgttgcatgttatcggttcggtttgattagtagtatggttttcaatcgtctggagagctctatggaaatgaaatggtttagggatcggaatcttgcgattttgtgagtaccttttgtttgaggtaaaatcagagcaccggtgattttgcttggtgtaataaagtacggttgtttggtcctcgattctggtagtgatgcttctcgatttgacgaagctatcctttgtttattccctattgaacaaaaataatccaactttgaagacggtcccgttgatgagattgaatgattgattcttaagcctgtccaaaatttcgcagctggcttgtttagatacagtagtccccatcacgaaattcatggaaacagttataatcctcaggaacaggggattccctgttcttccgatttgctttagtcccagaattttttttcccaaatatcttaaaaagtcactttctggttcagttcaatgaattgattgctacaaataatgcttttatagcgttatcctagctgtagttcagttaataggtaatacccctatagtttagtcaggagaagaacttatccgatttctgatctccatttttaattatatgaaatgaactgtagcataagcagtattcatttggattattttttttattagctctcaccccttcattattctgagctgaaagtctggcatgaactgtcctcaattttgttttcaaattcacatcgattatctatgcattatcctcttgtatctacctgtagaagtttctttttggttattccttgactgcttgattacagaaagaaatttatgaagctgtaatcgggatagttatactgcttgttcttatgattcatttcctttgtgcagttcttggtgtagcttgccactttcaccagcaaagttc

SEQ ID NO: 47 - DNA, 14721 bp, Artificial sequence
  expression vector
tcgagttcctgcaggtaccaaaagcttagcttgagcttggatcagattgtcgtttcccgccttcagtttaaactatcagtgtttgacaggatatattggcgggtaaacctaagagaaaagagcgtttattagaataatcggatatttaaaagggcgtgaaaaggtttatccgttcgtccatttgtatgtgcatgccaaccacagggttcccctcgggatcaaagtatgaagagatcgaggcggagatgatcgcggccgggtacgtgttcgagccgcccgcgcacgtctcaaccgtgcggctgcatgaaatcctggccggtttgtctgatgccaagctggcggcctggccggccagcttggccgctgaagaaaccgagcgccgccgtctaaaaaggtgatgtgtatttgagtaaaacagcttgcgtcatgcggtcgctgcgtatatgatgcgatgagtaaataaacaaatacgcaaggggaacgcatgaaggttatcgctgtacttaaccagaaaggcgggtcaggcaagacgaccatcgcaacccatctagcccgcgccctgcaactcgccggggccgatgttctgttagtcgattccgatccccagggcagtgcccgcgattgggcggccgtgcgggaagatcaaccgctaaccgttgtcggcatcgaccgcccgacgattgaccgcgacgtgaaggccatcggccggcgcgacttcgtagtgatcgacggagcgccccaggcggcggacttggctgtgtccgcgatcaaggcagccgacttcgtgctgattccggtgcagccaagcccttacgacatatgggccaccgccgacctggtggagctggttaagcagcgcattgaggtcacggatggaaggctacaagcggcctttgtcgtgtcgcgggcgatcaaaggcacgcgcatcggcggtgaggttgccgaggcgctggccgggtacgagctgcccattcttgagtcccgtatcacgcagcgcgtgagctacccaggcactgccgccgccggcacaaccgttcttgaatcagaacccgagggcgacgctgcccgcgaggtccaggcgctggccgctgaaattaaatcaaaactcatttgagttaatgaggtaaagagaaaatgagcaaaagcacaaacacgctaagtgccggccgtccgagcgcacgcagcagcaaggctgcaacgttggccagcctggcagacacgccagccatgaagcgggtcaactttcagttgccggcggaggatcacaccaagctgaagatgtacgcggtacgccaaggcaagaccattaccgagctgctatctgaatacatcgcgcagctaccagagtaaatgagcaaatgaataaatgagtagatgaattttagcggctaaaggaggcggcatggaaaatcaagaacaaccaggcaccgacgccgtggaatgccccatgtgtggaggaacgggcggttggccaggcgtaagcggctgggttgtctgccggccctgcaatggcactggaacccccaagcccgaggaatcggcgtgagcggtcgcaaaccatccggcccggtacaaatcggcgcggcgctgggtgatgacctggtggagaagttgaaggccgcgcaggccgcccagcggcaacgcatcgaggcagaagcacgccccggtgaatcgtggcaagcggccgctgatcgaatccgcaaagaatcccggcaaccgccggcagccggtgcgccgtcgattaggaagccgcccaagggcgacgagcaaccagattttttcgttccgatgctctatgacgtgggcacccgcgatagtcgcagcatcatggacgtggccgttttccgtctgtcgaagcgtgaccgacgagctggcgaggtgatccgctacgagcttccagacgggcacgtagaggtttccgcagggccggccggcatggccagtgtgtgggattacgacctggtactgatggcggtttcccatctaaccgaatccatgaaccgataccgggaagggaagggagacaagcccggccgcgtgttccgtccacacgttgcggacgtactcaagttctgccggcgagccgatggcggaaagcagaaagacgacctggtagaaacctgcattcggttaaacaccacgcacgttgccatgcagcgtacgaagaaggccaagaacggccgcctggtgacggtatccgagggtgaagccttgattagccgctacaagatcgtaaagagcgaaaccgggcggccggagtacatcgagatcgagctagctgattggatgtaccgcgagatcacagaaggcaagaacccggacgtgctgacggttcaccccgattactttttgatcgatcccggcatcggccgttttctctaccgcctggcacgccgcgccgcaggcaaggcagaagccagatggttgttcaagacgatctacgaacgcagtggcagcgccggagagttcaagaagttctgtttcaccgtgcgcaagctgatcgggtcaaatgacctgccggagtacgatttgaaggaggaggcggggcaggctggcccgatcctagtcatgcgctaccgcaacctgatcgagggcgaagcatccgccggttcctaatgtacggagcagatgctagggcaaattgccctagcaggggaaaaaggtcgaaaaggtctctttcctgtggatagcacgtacattgggaacccaaagccgtacattgggaaccggaacccgtacattgggaacccaaagccgtacattgggaaccggtcacacatgtaagtgactgatataaaagagaaaaaaggcgatttttccgcctaaaactctttaaaacttattaaaactcttaaaacccgcctggcctgtgcataactgtctggccagcgcacagccgaagagctgcaaaaagcgcctacccttcggtcgctgcgctccctacgccccgccgcttcgcgtcggcctatcgcggccgctggccgctcaaaaatggctggcctacggccaggcaatctaccagggcgcggacaagccgcgccgtcgccactcgaccgccggcgcccacatcaaggcaccctgcctcgcgcgtttcggtgatgacggtgaaaacctctgacacatgcagctcccggagacggtcacagcttgtctgtaagcggatgccgggagcagacaagcccgtcagggcgcgtcagcgggtgttggcgggtgtcggggcgcagccatgacccagtcacgtagcgatagcggagtgtatactggcttaactatgcggcatcagagcagattgtactgagagtgcaccatatgcggtgtgaaataccgcacagatgcgtaaggagaaaataccgcatcaggcgctcttccgcttcctcgctcactgactcgctgcgctcggtcgttcggctgcggcgagcggtatcagctcactcaaaggcggtaatacggttatccacagaatcaggggataacgcaggaaagaacatgtgagcaaaaggccagcaaaaggccaggaaccgtaaaaaggccgcgttgctggcgtttttccataggctccgcccccctgacgagcatcacaaaaatcgacgctcaagtcagaggtggcgaaacccgacaggactataaagataccaggcgtttccccctggaagctccctcgtgcgctctcctgttccgaccctgccgcttaccggatacctgtccgcctttctcccttcgggaagcgtggcgctttctcatagctcacgctgtaggtatctcagttcggtgtaggtcgttcgctccaagctgggctgtgtgcacgaaccccccgttcagcccgaccgctgcgccttatccggtaactatcgtcttgagtccaacccggtaagacacgacttatcgccactggcagcagccactggtaacaggattagcagagcgaggtatgtaggcggtgctacagagttcttgaagtggtggcctaactacggctacactagaaggacagtatttggtatctgcgctctgctgaagccagttaccttcggaaaaagagttggtagctcttgatccggcaaacaaaccaccgctggtagcggtggtttttttgtttgcaagcagcagattacgcgcagaaaaaaaggatctcaagaagatcctttgatcttttctacggggtctgacgcttagtggaacgaaaactcacgttaagggattttggtcatgcatgatatatctcccaatttgtgtagggcttattatgcacgcttaaaaataataaaagcagacttgacctgatagtttggctgtgagcaattatgtgcttagtgcatctaacgcttgagttaagccgcgccgcgaagcggcgtcggcttgaacgaatttctagctagacattatttgccgactaccttggtgatctcgcctttcacgtagtggacaaattcttccaactgatctgcgcgcgaggccaagcgatcttcttcttgtccaagataagcctgtctagcttcaagtatgacgggctgatactgggccggcaggcgctccattgcccagtcggcagcgacatccttcggcgcgattttgccggttactgcgctgtaccaaatgcgggacaacgtaagcactacatttcgctcatcgccagcccagtcgggcggcgagttccatagcgttaaggtttcatttagcgcctcaaatagatcctgttcaggaaccggatcaaagagttcctccgccgctggacctaccaaggcaacgctatgttctcttgcttttgtcagcaagatagccagatcaatgtcgatcgtggctggctcgaagatacctgcaagaatgtcattgcgctgccattctccaaattgcagttcgcgcttagctggataacgccacggaatgatgtcgtcgtgcacaacaatggtgacttctacagcgcggagaatctcgctctctccaggggaagccgaagtttccaaaaggtcgttgatcaaagctcgccgcgttgtttcatcaagccttacggtcaccgtaaccagcaaatcaatatcactgtgtggcttcaggccgccatccactgcggagccgtacaaatgtacggccagcaacgtcggttcgagatggcgctcgatgacgccaactacctctgatagttgagtcgatacttcggcgatcaccgcttcccccatgatgtttaactttgttttagggcgactgccctgctgcgtaacatcgttgctgctccataacatcaaacatcgacccacggcgtaacgcgcttgctgcttggatgcccgaggcatagactgtaccccaaaaaaacagtcataacaagccatgaaaaccgccactgcgccgttaccaccgctgcgttcggtcaaggttctggaccagttgcgtgagcgcatacgctacttgcattacagcttacgaaccgaacaggcttatgtccactgggttcgtgcccgaattgatcacaggcagcaacgctctgtcatcgttacaatcaacatgctaccctccgcgagatcatccgtgtttcaaacccggcagcttagttgccgttcttccgaatagcatcggtaacatgagcaaagtctgccgccttacaacggctctcccgctgacgccgtcccggactgatgggctgcctgtatcgagtggtgattttgtgccgagctgccggtcggggagctgttggctggctggtggcaggatatattgtggtgtaaacaaattgacgcttagacaacttaataacacattgcggacgtttttaatgtactgaattaacgccgaattgaattcaagagctcaaggatcctaactataacggtcctaaggtagcgaaggcgcgccgaattcgaggggatcgagcccctgctgagcctcgacatgttgtcgcaaaattcgccctggacccgcccaacgatttgtcgtcactgtcaaggtttgacctgcacttcatttggggcccacatacaccaaaaaaatgctgcataattctcggggcagcaagtcggttacccggccgccgtgctggaccgggttgaatggtgcccgtaactttcggtagagcggacggccaatactcaacttcaaggaatctcacccatgcgcgccggcggggaaccggagttcccttcagtgagcgttattagttcgccgctcggtgtgtcgtagatactagcccctggggcacttttgaaatttgaataagatttatgtaatcagtcttttaggtttgaccggttctgccgctttttttaaaattggatttgtaataataaaacgcaattgtttgttattgtggcgctctatcatagatgtcgctataaacctattcagcacaatatattgttttcattttaatattgtacatataagtagtagggtacaatcagtaaattgaacggagaatattattcataaaaatacgatagtaacgggtgatatattcattagaatgaaccgaaaccggcggtaaggatctgagctacacatgctcaggttttttacaacgtgcacaacagaattgaaagcaaatatcatgcgatcataggcgtctcgcatatctcattaaagcagggggtgggcgaagaactccagcatgagatccccgcgctggaggatcatccagccggcgtcccggaaaacgattccgaagcccaacctttcatagaaggcggcggtggaatcgaaatctcgtgatggcaggttgggcgtcgcttggtcggtcatttcgaaccccagagtcccgctcagaagaactcgtcaagaaggcgatagaaggcgatgcgctgcgaatcgggagcggcgataccgtaaagcacgaggaagcggtcagcccattcgccgccaagctcttcagcaatatcacgggtagccaacgctatgtcctgatagcggtccgccacacccagccggccacagtcgatgaatccagaaaagcggccattttccaccatgatattcggcaagcaggcatcgccatgggtcacgacgagatcctcgccgtcgggcatgcgcgccttgagcctggcgaacagttcggctggcgcgagcccctgatgctcttcgtccagatcatcctgatcgacaagaccggcttccatccgagtacgtgctcgctcgatgcgatgtttcgcttggtggtcgaatgggcaggtagccggatcaagcgtatgcagccgccgcattgcatcagccatgatggatactttctcggcaggagcaaggtgagatgacaggagatcctgccccggcacttcgcccaatagcagccagtcccttcccgcttcagtgacaacgtcgagcacagctgcgcaaggaacgcccgtcgtggccagccacgatagccgcgctgcctcgtcctgcagttcattcagggcaccggacaggtcggtcttgacaaaaagaaccgggcgcccctgcgctgacagccggaacacggcggcatcagagcagccgattgtctgttgtgcccagtcatagccgaatagcctctccacccaagcggccggagaacctgcgtgcaatccatcttgttcaatccacatgatcaaacgttttgaggacgcgagaggattcgattcgacgacgagagcctcgcgagattggggagaaatttttcgggggtggagctgatgcgaggagaggagatgagggggctggtatttatggcggttgggtggtgggaggagtcccgtgccgtgacgtctccgtctgcttggagaatccgccacgctgaaaccaccgcggtttccgggaagacgaggcgggcgagcgagcggttgggaaatttcgagaagatgccgtttgtctccgtttggtacacgtctcgttgatttttttttagtgaattacgctttggaccacattttattatctaagggtgtgtttggttgtaagccacactttgccacagtttgccacgcctaaggttaggcaaatttgacaggtgtttggttgtagccacagttgtggcaagatttccctctaacaaattaagtcccacgtgtcaatggctcaaaaaagtgtggcaagattcccttaggcttagtaagttgtggctaacaatttgatcacctcaccttagacaaggtgtggcaacttttgttggcaagtaatggtaaagtatggctgggaaccaaacagcccctaagttttactttggactacctttaaacatatcttttcactttgaactagataaatttgctattgttgcgatttggattttttttttctcgtgcaatcaacgaccttaaacacatcagctctagtatacggccgatctcctctatatatggttcatatgtttgccgaaagggaagttagacatgacgaaaagttgttcatggtagtccaaaccacaacccggcccaatttgaaaagataggtttaagggtggtccaaattgaaacttgggtaataaaaggtggatcaaagtgcaatttacttttttttactgtaatttcttctggctggtttgttggtcgccgttaggaccgggtgacgccgtcaaccccgcgcctccgtattcgctgacgtggggtggcgcgctggcttccgccttgacccgaatttgttttccttccgttaaaaaaatggttttccttttcttaaaaaggaaatagtttgttttttaagtctgtgtattaggattattacacttgaattttggtatatgtgtaggataatttactgcatgtttataatagagttgtactatagatgaaataacccaatttttggtataattcgtgtttggttggaggtcaaaataacaggttattttgtgaagaaaaaactccgtagtatagtaccatatccatcatgaatacacatactgcctagacgagtgattaggatgaatccatgttatattcctcaaaataatataaaccacttgatcttatgatcttatccaatctgttcatataaactggagatataagatggtgcatttcccttttgatttcttttgttgacggccatgagataggttgcatccactgcatttatattttggaccaatacaatgcacctattgatacatggggacagctcaactaaccatgatgcaaaatgctggttggtgaccagttcttggcattatgataatgataggattaaaaaaaacagtgcaatgtctcggaaagaaaccatgacaaagggtacatgttgcattccagtttctaatgataaaattatgtgccagcaattcaaaaatcatgcgtgttccctacgcaccattctttgcaataaacaagtgcatgcacaatatgattgtgctaaggttcaagaacttgttgcagtggctaagcttggcgcgcctcgcgaccacctttaattaagtgaagagcaggagcttgcatgcctgcaggctctagaggatcccccctcagaagaccagagggctattgagacttttcaacaaagggtaatatcgggaaacctcctcggattccattgcccagctatctgtcacttcatcgaaaggacagtagaaaaggaaggtggctcctacaaatgccatcattgcgataaaggaaaggctatcgttcaagatgcctctaccgacagtggtcccaaagatggacccccacccacgaggaacatcgtggaaaaagaagacgttccaaccacgtcttcaaagcaagtggattgatgtgatatctccactgacgtaagggatgacgcacaatcccactatccttcgcaagacccttcctctatataaggaagttcatttcatttggagaggacaggcttcttgagatccttcaacaattaccaacaacaacaaacaacaaacaacattacaattactatttacaattacagtcgactctagaggatccatggtgagcaagggcgaggagctgttcaccggggtggtgcccatcctggtcgagctggacggcgacgtaaacggccacaagttcagcgtgtccggcgagggcgagggcgatgccacctacggcaagctgaccctgaagttcatctgcaccaccggcaagctgcccgtgccctggcccaccctcgtgaccaccttcacctacggcgtgcagtgcttcagccgctaccccgaccacatgaagcagcacgacttcttcaagtccgccatgcccgaaggctacgtccaggagcgcaccatcttcttcaaggacgacggcaactacaagacccgcgccgaggtgaagttcgagggcgacaccctggtgaaccgcatcgagctgaagggcatcgacttcaaggaggacggcaacatcctggggcacaagctggagtacaactacaacagccacaacgtctatatcatggccgacaagcagaagaacggcatcaaggtgaacttcaagatccgccacaacatcgaggacggcagcgtgcagctcgccgaccactaccagcagaacacccccatcggcgacggccccgtgctgctgcccgacaaccactacctgagcacccagtccgccctgagcaaagaccccaacgagaagcgcgatcacatggtcctgctggagttcgtgaccgccgccgggatcactcacggcatggacgagctgtacaagtaaagcggccgcccggctgcagatcgttcaaacatttggcaataaagtttcttaagattgaatcctgttgccggtcttgcgatgattatcatataatttctgttgaattacgttaagcatgtaataattaacatgtaatgcatgacgttatttatgagatgggtttttatgattagagtcccgcaattatacatttaatacgcgatagaaaacaaaatatagcgcgcaaactaggataaattatcgcgcgcggtgtcatctatgttactagatccgatgataagctgtcaaacatgagaattcctttcgtcgacccacgtgttgctgaggtatttaaataatccgaaaagtttctgcaccgttttcaccccctaactaacaatatagggaacgtgtgctaaatataaaatgagaccttatatatgtagcgctgataactagaactatgcaagaaaaactcatccacctactttagtggcaatcgggctaaataaaaaagagtcgctacactagtttcgttttccttagtaattaagtgggaaaatgaaatcattattgcttagaatatacgttcacatctctgtcatgaagttaaattattcgaggtagccataattgtcatcaaactcttcttgaataaaaaaatctttctagctgaactcaatgggtaaagagagagattttttttaaaaaaatagaatgaagatattctgaacgtattggcaaagatttaaacatataattatataattttatagtttgtgcattcgtcatatcgcacatcattaaggacatgtcttactccatcccaatttttatttagtaattaaagacaattgacttatttttattatttatcttttttcgattagatgcaaggtacttacgcacacactttgtgctcatgtgcatgtgtgagtgcacctcctcaatacacgttcaactagcaacacatctctaatatcactcgcctatttaatacatttaggtagcaatatctgaattcaagcactccaccatcaccagaccacttttaataatatctaaaatacaaaaaataattttacagaatagcatgaaaagtatgaaacgaactatttaggtttttcacatacaaaaaaaaaaagaattttgctcgtgcgcgagcgccaatctcccatattgggcacacaggcaacaacagagtggctgcccacagaacaacccacaaaaaacgatgatctaacggaggacagcaagtccgcaacaaccttttaacagcaggctttgcggccaggagagaggaggagaggcaaagaaaaccaagcatcctccttctcccatctataaattcctccccccttttcccctctctatataggaggcatccaagccaagaagagggagagcaccaaggacacgcgactagcagaagccgagcgaccgccttctcgatccatatcttccggtcgagttcttggtcgatctcttccctcctccacctcctcctcacagggtatgtgcctcccttcggttgttcttggatttattgttctaggttgtgtagtacgggcgttgatgttaggaaaggggatctgtatctgtgatgattcctgttcttggatttgggatagaggggttcttgatgttgcatgttatcggttcggtttgattagtagtatggttttcaatcgtctggagagctctatggaaatgaaatggtttagggatcggaatcttgcgattttgtgagtaccttttgtttgaggtaaaatcagagcaccggtgattttgcttggtgtaataaagtacggttgtttggtcctcgattctggtagtgatgcttctcgatttgacgaagctatcctttgtttattccctattgaacaaaaataatccaactttgaagacggtcccgttgatgagattgaatgattgattcttaagcctgtccaaaatttcgcagctggcttgtttagatacagtagtccccatcacgaaattcatggaaacagttataatcctcaggaacaggggattccctgttcttccgatttgctttagtcccagaattttttttcccaaatatcttaaaaagtcactttctggttcagttcaatgaattgattgctacaaataatgcttttatagcgttatcctagctgtagttcagttaataggtaatacccctatagtttagtcaggagaagaacttatccgatttctgatctccatttttaattatatgaaatgaactgtagcataagcagtattcatttggattattttttttattagctctcaccccttcattattctgagctgaaagtctggcatgaactgtcctcaattttgttttcaaattcacatcgattatctatgcattatcctcttgtatctacctgtagaagtttctttttggttattccttgactgcttgattacagaaagaaatttatgaagctgtaatcgggatagttatactgcttgttcttatgattcatttcctttgtgcagttcttggtgtagcttgccactttcaccagcaaagttcatttaaatcaactagggatatcacaagtttgtacaaaaaagcaggcttaaacaatggagagggactttatgggattgaatatcaaagattctttacttgtagtcaaggatgaacctgttgaaagctcaaaagactctgggtttcgctggccaatgtcgagcaaggttggtgtacctcatttcatgtccttgaactctgctcaagatgagaacaccttcaaagctctatctgccacagatggagtcgatgctggtctcaaacgtcagcctggtgaactccagaatgtgcatgcaatgcatcttccatatgatgttaagatgcttccatttaacatgaacaacccctcctacaagactcattttggtggtattggccagatgaagcaagttcttggtggaattcctgttacagctcctcattcaatgcttccatcgcgtggctctgtggctggaacaaccgaaccttggtttaattccaagggttctgcagcacctgctcaactgaccatcttctatggtgggatggtcaatgtcttcgaggatatctcccctgagaaggcacaggctattatgtttttggctggacatggctgtgctccacctaatgtggtgcagccaaggtttcaacttcaggcatctgcatcgaaacctgctgctgcagatggtgtttgtgtgaaccaaaccccaaacatgctgcctgcctcgggtctttctagcactatgtccgtttcttcccatcccattggtcaatctgatggcagttctggaaacaaagatgacatgaagatgtctaaaactgcaaacatttcagtgactccccatgtcaaattggacacttcaaagattgtgacatcactaggacctgttggggcgactaccataatgacagcagcggttccacaagctaggaaagcatctttggctcgttttctggagaagcgcaaggaaagggtgatgaacttagcaccatatggcctcagcaagaaatcgcctgagtgctccacccccgagtctaatggagttggtttctctgcaacttccactcctctgttagccggtaaggagacctagctatgatatctgaaacccagctttcttgtacaaagtggtgatatcacaagcccgggcggtcttctagggataacagggtaattatatccctctagatcacaagcccgggcggtcttctacgatgattgagtaataatgtgtcacgcatcaccatgggtggcagtgtcagtgtgagcaatgacctgaatgaacaattgaaatgaaaagaaaaaaagtactccatctgttccaaattaaaattggttttaaccttttaataggtttatacaataattgatatatgttttctgtatatgtctaatttgttatcatccgggcggtcttctagggataacagggtaattatatccctctagacaacacacaacaaataagagaaaaaacaaataatattaatttgagaatgaacaaaaggaccatatcattcattaactcttctccatccacttccatttcacagttcgatagcgaaaaccgaataaaaaacacagtaaattacaagcacaacaaatggtacaagaaaaacagttttcccaatgccataatactcgac

SEQ ID NO: 48 - DNA, 56 bp, Artificial sequence
  primer: prm16282
ggggacaagtttgtacaaaaaagcaggcttaaacaatggagagggactttatggga

SEQ ID NO: 49 - DNA, 50 bp, Artificial sequence
  primer: prm16283
ggggaccactttgtacaagaaagctgggtgtggaagttgcagagaaacca

SEQ ID NO: 50 - DNA, 1131 bp, Lycopersicon esculentum
atggcgaccatcaatggcttaacctcaccacacccctttctctctctacaaaaatccaactcaaagccctttctctctctgtcaaaacccatgaagtctcaattcttattcaaaggtcttaaacagcagaatcagcagttgagagattgggctgtagtgggttcggtatcaaacgaagccgacgagattcgggtccaaagttctgacgttatggaccagcaaaatggggttgtaattgggttggaaagagaaccgaaattagggggcggagatatgggtattgtaaatcaggtggtgggtgggtttggaaatgaagggaggttgtcgtttgaaggtggtggtgggttttcttcggcaagtggtgttggtggatcagagagtaaagaggaggatgtggagaaacttattgatagaactataaatgcaactattgtgttagctgctggatcttttgctattactaaattgctcactattgatcatgattactggcatggatggaccttatttgagatattgagatatgcacctcagcacaactgggttgcatacgaggaagcgcttaaaagaaatccagttttggctaaaatggttatcagtggagtggtttactctgttggggattggattgcacagtgctatgaagggaagcctctttttgaaatcgatcgtgcacgtatgttgagatcaggcttagttggattcacgctacatggatccctctctcattattattatcagttctgtgaggcactgtttccattcgaagattggtgggtggttcctgtcaaggttgcctttgatcaaactgtttggtcagcaatttggaacagcatctacttcacagttttgggaattttacgtcttgaatcccctcttgctattttcagtgaattgaaggctacgttcttgccaatgttgacggctggttggaagctgtggccatttgctcatctaattacatatggtgtaattccggttgaacaaaggcttctttgggttgactgtgtagaactcgtttgggtgacaatactctcaacttattcaaatgagaaatcagaatctagagtctctgaggtgatcgtagaagcagaggcgcaacctccctcagtaagcccaccacaggagtaa

SEQ ID NO: 51 - protein, 376 aa, Lycopersicon esculentum
MATINGLTSPHPFLSLQKSNSKPFLSLSKPMKSQFLFKGLKQQNQQLRDWAVVGSVSNEADEIRVQSSDVMDQQNGVVIGLEREPKLGGGDMGIVNQVVGGFGNEGRLSFEGGGGFSSASGVGGSESKEEDVEKLIDRTINATIVLAAGSFAITKLLTIDHDYWHGWTLFEILRYAPQHNWVAYEEALKRNPVLAKMVISGVVYSVGDWIAQCYEGKPLFEIDRARMLRSGLVGFTLHGSLSHYYYQFCEALFPFEDWWVVPVKVAFDQTVWSAIWNSIYFTVLGILRLESPLAIFSELKATFLPMLTAGWKLWPFAHLITYGVIPVEQRLLWVDCVELVWVTILSTYSNEKSESRVSEVIVEAEAQPPSVSPPQE

SEQ ID NO: 52 - DNA, 1083 bp, Arabidopsis lyrata
atggctgctgcttcactccacacctcaatctctccacgtagcttccttcctctctctaaaccgtctctgaaacctcaccgttcccaaattttcctgagaaacaaacagaggacgtgcgcgttgatccgtgacgaaatcgacgtgattccggttcagagccgagatcggacggaccatgaggaaggttcggtggtggttatgagtactgagacggagagagatgttaacgaatcggtggttgtagggtttagtgcagcaacgagcgaaggtcagctttcgttggaagggtttccttcttcgggaggtgatttgggagatgagaagagaggagagaacgaagaaagggagaagatgattgatagaaccattaacgctactattgttttagctgctggttcttacgccattaccaaattgctcaccattgatcatgattattggcatgtatggacactgttagaaattctaagatatgctcctcaacataactggattgcttacgaagaagcgttaaagcaaaacccggttctagcgaaaatggtcataagtggagttgtctactctgtaggagattggatagctcagtgttacgaaggcaaacccttgtttgaaattgatcgagcaagaacattgagatcaggactagtgggttttactctccatggctcgttgtctcatttctattaccagttctgtgaagagcttttcccttttcaagattggtgggtggttcctgtgaaagttgtctttgatcaaacagtatggtcggctatatggaacagtatttacttcacggttcttgggtttctgcgttttgaatcgcctctcagcatcttcaaagaactaaaagctaccttcttgcctatgttaacagcagggtggaagctttggccatttgctcatttgatcacatacggtttggtgcctgtagaacaacgacttctctgggtagattgcgtggagcttatttgggtcactatactttcgacttactcgaacgagaaatcagaagctagaatctcggaatccgttattgaaacctcttcgagttctactacatccattgatccctcaaaggaatga

SEQ ID NO: 53 - protein, 360 aa, Arabidopsis lyrata
MAAASLHTSISPRSFLPLSKPSLKPHRSQIFLRNKQRTCALIRDEIDVIPVQSRDRTDHEEGSVVVMSTETERDVNESVVVGFSAATSEGQLSLEGFPSSGGDLGDEKRGENEEREKMIDRTINATIVLAAGSYAITKLLTIDHDYWHVWTLLEILRYAPQHNWIAYEEALKQNPVLAKMVISGVVYSVGDWIAQCYEGKPLFEIDRARTLRSGLVGFTLHGSLSHFYYQFCEELFPFQDWWVVPVKVVFDQTVWSAIWNSIYFTVLGFLRFESPLSIFKELKATFLPMLTAGWKLWPFAHLITYGLVPVEQRLLWVDCVELIWVTILSTYSNEKSEARISESVIETSSSSTTSIDPSKE

SEQ ID NO: 54 - DNA, 1101 bp, Arabidopsis thaliana
atggctgctgcttcactccacacttcaatctcaccacgtagcttccttcctctctccaaaccatctctaaaacctcaccgttcccaaattctactgagaaacaaacagaggaattgcgtttcgtgcgcattgatccgtgacgaaatcgacctgattccggttcagagccgagatcggaccgaccatgaggaaggttcggtggtagtgatgagcactgagacggcggttgatggtaatgaatcggttgttgtaggttttagtgctgcgacgagtgaaggtcagctttcgttagaagggtttccttcttcttcttcttcgggagctgatttaggagatgaaaagagaagagagaacgaagaaatggagaagatgatcgatcgaaccattaacgctacgattgttttagctgctggttcttacgctattaccaaattgcttaccatcgatcatgattattggcatggatggactctgtttgagatactaagatatgctcctcaacataactggattgcttacgaagaagcgctaaagcaaaacccggttctagcaaaaatggtcattagtggagttgtctactctgtaggagattggatagctcagtgttacgaaggcaaaccgttgtttgaaattgatagagcaagaacattgagatcaggactagtaggtttcactctccatggctcgttatcgcatttctattaccagttctgtgaagagcttttcccgtttcaagattggtgggtggttcctgtgaaagttgcctttgatcaaacagtctggtcagctatatggaacagtatttacttcacggttcttggtttcctgcgtttcgaatcgcctatcagcatcttcaaagaactaaaagctacgttcttgcctatgctaacagcaggttggaagctttggccatttgctcatttgatcacatacggtttggtcccagtagaacaacgacttctctgggtagattgcgtggagcttatttgggtcactatactttcgacttactcgaacgagaaatcagaagctagaatctcggaatctgtcattgagacctcttcgagttctactacaaccattgatccctctaaggaatga

SEQ ID NO: 55 - protein, 366 aa, Arabidopsis thaliana
MAAASLHTSISPRSFLPLSKPSLKPHRSQILLRNKQRNCVSCALIRDEIDLIPVQSRDRTDHEEGSVVVMSTETAVDGNESVVVGFSAATSEGQLSLEGFPSSSSSGADLGDEKRRENEEMEKMIDRTINATIVLAAGSYAITKLLTIDHDYWHGWTLFEILRYAPQHNWIAYEEALKQNPVLAKMVISGVVYSVGDWIAQCYEGKPLFEIDRARTLRSGLVGFTLHGSLSHFYYQFCEELFPFQDWWVVPVKVAFDQTVWSAIWNSIYFTVLGFLRFESPISIFKELKATFLPMLTAGWKLWPFAHLITYGLVPVEQRLLWVDCVELIWVTILSTYSNEKSEARISESVIETSSSSTTTIDPSKE

SEQ ID NO: 56 - DNA, 1059 bp, Brassica napus
atggctgcttcttcactcaacacctcaatctctccacgtagcttcctccctctctcaaaaccttctccaaaaccccaccgctctcaagtcttccttaggaacaaacagagaagctgcgtttcgtgcgcgttgatcaacgatgaaaccgatgtgattccggtgaagagccacgatgacggctctgtggtggtgatgagcaacgagacggagagagatgtgaacgagccggtggttgttggtcagctttcgtttgaagggttcccttcatcttctccagcagctgacatgggagacgacaagagcagagagagcgaagagatggacaagatgatcgataggagcatcaacgccacgatagttctagctgctggtacttacgccatcaccaaactgctcaccatcgatcatgattattggcatggatggacactgtttgagatattaagatacgctcctcaacataactggcttgcttacgaggaagcgttgaagagaaaccctgttctcgccaaaatggtcataagtggagttgtgtattctgtcggagactggatagctcagtgttacgaaggcaaacctttgtttgagattgacagagcaagaacattgaggtcaggactagtgggtttcactctccatggctctttgtctcatttctattaccaattctgcgaggaacttttcccttttcaagattggtgggttgttcctgctaaagtcgctttcgatcaaaccgtgtggtctgctatatggaacagtatttacttcacggttcttgggtttcttcgtcttgaatcacctctcagcatcttcaaagaattaaaagctacgttcttgccgatgctaacagcagggtggaagctttggccgtttgctcatttgatcacatacggtttggttcctgtagaacaacgactactatgggttgattgcgtggagcttatttgggtcactatactctcaacttactcaaatgaaaagtcagaagctagaatctcggagtccgtcattgagaacccttcgagttctactacacccattgatccctccaaggaatga

SEQ ID NO: 57 - protein, 352 aa, Brassica napus
MAASSLNTSISPRSFLPLSKPSPKPHRSQVFLRNKQRSCVSCALINDETDVIPVKSHDDGSVVVMSNETERDVNEPVVVGQLSFEGFPSSSPAADMGDDKSRESEEMDKMIDRSINATIVLAAGTYAITKLLTIDHDYWHGWTLFEILRYAPQHNWLAYEEALKRNPVLAKMVISGVVYSVGDWIAQCYEGKPLFEIDRARTLRSGLVGFTLHGSLSHFYYQFCEELFPFQDWWVVPAKVAFDQTVWSAIWNSIYFTVLGFLRLESPLSIFKELKATFLPMLTAGWKLWPFAHLITYGLVPVEQRLLWVDCVELIWVTILSTYSNEKSEARISESVIENPSSSTTPIDPSKE

SEQ ID NO: 58 - DNA, 1134 bp, Ipomoea nil
atggccaccattaacggcctgcccacgcctcaaaccctccgttctctatccaaacccaacccaaagaccggttccccatcccacttcaagccgaccaagctccagctattccccaggccggtttccaagcagtttgcggccgcggcggcgaaggagctggacgtgattccggtgcagagcagcgacagcacggaccagcaaggcggcgtcgtcgacgccaccgagagagaggccgagggcggtggcgatattgacagtatcgtgaatcaggtggtggtggtgggtgggtttggaaatgaagggcggctgtcgttcgaagggcccaccgggtttggctcctcttcgtcgtcgtcgtcggcggcttcttcgagcggcggcgccggagaagagttgggtatggagaaggttgttgatagagctatcaacgctaccattgttttggccgccggcactttcgctatcactaagctgctcaccatagaccataactactggcatggatggaccctctttgagatattgaggtatgcaccccagcacaactggagtgcatatgaggaagcgcttaaagaaaaccccgttttggcgaagatggtgataagtggagtggtttattctctaggggattggatagctcagtgctatgaagggaaaccgctttttgaatttgatcgtgcacgcatgttcagatcaggtctaactggatttacactacatggatccttatctcactattactatcacttctgtgaggcactctttccttttgatgattggtgggtggtacctgccaaagttgcatttgatcaaactgtttggtcagcaatttggaacagcatttacttcacagttcttggatttttacgtcttgaatcccctaccagtatcttcagtgaactaaaggcaacattttggcccatgcttacggcaggctggaaactttggccatttgctcatctaattacctatggcgtgatccccgttgagcagagactgctttgggttgactgtgtagagctcatttgggttacaatactctcaacttactcgaatgagaagtcagaagctagaatatccgaggaatcagtggaagcaacttccaaccctccctctgtaggcccatctcagaagtaa

SEQ ID NO: 59 - protein, 377 aa, Ipomoea nil
MATINGLPTPQTLRSLSKPNPKTGSPSHFKPTKLQLFPRPVSKQFAAAAAKELDVIPVQSSDSTDQQGGVVDATEREAEGGGDIDSIVNQVVVVGGFGNEGRLSFEGPTGFGSSSSSSSAASSSGGAGEELGMEKVVDRAINATIVLAAGTFAITKLLTIDHNYWHGWTLFEILRYAPQHNWSAYEEALKENPVLAKMVISGVVYSLGDWIAQCYEGKPLFEFDRARMFRSGLTGFTLHGSLSHYYYHFCEALFPFDDWWVVPAKVAFDQTVWSAIWNSIYFTVLGFLRLESPTSIFSELKATFWPMLTAGWKLWPFAHLITYGVIPVEQRLLWVDCVELIWVTILSTYSNEKSEARISEESVEATSNPPSVGPSQK

SEQ ID NO: 60 - DNA, 1071 bp, Nicotiana benthamiana
atggcgaccatcaatggcttgacctcaccacagccatttctctctctaccaaagcccaaacgaaaatcctctcattcccacttcaagcctttgaagccacaaatcttatccaaaggcctcaaacagcagaatcagcagctaagagactgggcagtagtgggctcggtggacaacgaaaccgacctgattccagtccaaagcgacgacactacggaccagcaaagtggcgtcgtaattgggttagaaagagaaccggaaggtggagatatggatttagtaaaacaggtagtgggtgggtttggaaatgaagggagattatcattcgaaggtgctgctcgtgggtttagttcttcttcaagtgggtctaatggaaaattagaacaagaggacatgaacagagtcattgatagagctattaatgcaactattgttttagctgctgggagttttgctatcactaaattgctcactattgaccacgattactggcatggatggaccgtatatgagatatttagatatgcacctcagcacaactggattgcatatgaggaagctcttaaaagaaacccagttttggctaaaatggtcatcagtggagtggtttactctattggggattggatcgcacagtgctatgaagggaagcctctttttgactttgatcgtgcacgtatgttgagatctggctttgttggattcacgctacatggatccctctcccattattattatcagttctgtgaggcactttttcctttccaagattggtgggtggttcctgtcaaggttgcctttgatcaaactgtttggtcagcaatttggaacagcatttactacacagttttgggagttttgcgctttgaatcccctctcggcattttcagtgaattgaaggctacattctggccaatgttgactgcaggttggaagctgtggccatttgctcatcttattacatatggtgtagtcccggttgaacaaaggcttctttgggtcgactgtgtagaacttatttgggtgacaatactctcaacttattcaaatgagaaatcagaagctagtctttga

SEQ ID NO: 61 - protein, 356 aa, Nicotiana benthamiana
MATINGLTSPQPFLSLPKPKRKSSHSHFKPLKPQILSKGLKQQNQQLRDWAVVGSVDNETDLIPVQSDDTTDQQSGVVIGLEREPEGGDMDLVKQVVGGFGNEGRLSFEGAARGFSSSSSGSNGKLEQEDMNRVIDRAINATIVLAAGSFAITKLLTIDHDYWHGWTVYEIFRYAPQHNWIAYEEALKRNPVLAKMVISGVVYSIGDWIAQCYEGKPLFDFDRARMLRSGFVGFTLHGSLSHYYYQFCEALFPFQDWWVVPVKVAFDQTVWSAIWNSIYYTVLGVLRFESPLGIFSELKATFWPMLTAGWKLWPFAHLITYGVVPVEQRLLWVDCVELIWVTILSTYSNEKSEASL

SEQ ID NO: 62 - DNA, 1137 bp, Nicotiana tabacum
atgtcgaccatcaatggtctgacctcaccacagccttttctctctctaccaaagcccaaaccaaaaccctcttattcccacttcaagcctttgaagccaagaatcttatccaaaggcctcaaacagcagaatcagcagaatcagcagctaagagattgggccgtcgtgggctcggtggccaacgaaaccgacctgattccagtccaaagcaacgacactacggaccagcaaagaggcgtcgtaattgggttagaaagagaaccggaaggtggagatatggatatggtaaatcaggtagtgggtgggtttggaaatgaagggagattatcgtttgaaggtgctgctggtgggtttagttcttcttcaagtgggtctaatggcaaatcagaacaagaggatatggacagggtcattgatagagctattaatgcaactattgttttagctgctggaagttttgctatcactaaattgctcactattgaccatgattactggcacggatggaccatatatgagatattgagatatgcacctcagcacaactggattgcgtatgaggaagcccttaaaagaaacccagttttggctaaaatggtgatcagtggagtggtttactctcttggggattggatcgcacagtgctatgaaggaaagcctctttttgactttgatcgtgcacgtatgttgagatctggcttagttggattcactcttcatggatcgctctctcattattattatcagatctgtgaggcactttttcctttccaagattggtgggtggttcctgtcaaggttgcctttgatcagactgtttggtcagcaatttggaacagcatttactacacagttttgggagttttgcgctttgaatcccctctcgccattttcagtgaattgaaggctacattctggccaatgttgactgcaggttggaagctgtggccatttgctcatcttattacatatggtgtagtcccggttgaacaaaggcttctttgggtcgactgtgtagaacttatttgggtgacaatactctcaacttattcaaatgagaaatcagaagctagagtctccgaggcatcagtggaagcagaaatgcaacctccctcaataggtccacctcaggagtaa

SEQ ID NO: 63 - protein, 378 aa, Nicotiana tabacum
MSTINGLTSPQPFLSLPKPKPKPSYSHFKPLKPRILSKGLKQQNQQNQQLRDWAVVGSVANETDLIPVQSNDTTDQQRGVVIGLEREPEGGDMDMVNQVVGGFGNEGRLSFEGAAGGFSSSSSGSNGKSEQEDMDRVIDRAINATIVLAAGSFAITKLLTIDHDYWHGWTIYEILRYAPQHNWIAYEEALKRNPVLAKMVISGVVYSLGDWIAQCYEGKPLFDFDRARMLRSGLVGFTLHGSLSHYYYQICEALFPFQDWWVVPVKVAFDQTVWSAIWNSIYYTVLGVLRFESPLAIFSELKATFWPMLTAGWKLWPFAHLITYGVVPVEQRLLWVDCVELIWVTILSTYSNEKSEARVSEASVEAEMQPPSIGPPQE

SEQ ID NO: 64 - DNA, 1116 bp, Solanum tuberosum
atggcgaccatcaatggcttgacctcaccacagccctttctctctctacaaaaatccaactcaaagccctttctctctctatcgaaacccatgaagtctcaattcttattcaaaggtcttaaacagcagaatcagcagttgagggattgggctgtagtgggttcggtaacaaacgaagccgacgtgattccggttcaaagtactgacgttacggaccagcaaaacggagtcgtaattggattggaaagagaaccggaattagggggcggagagatggatattgtaaatcaggtggtgggtgggtttggaaatgaagggaggttatcgtttgaaggtgctggtgggttttcttcggcaagtggtgttggtgggtcggatgtggagaaacttattgatagagctataaatgcaactattgtgttagctgctggatcttttgctattactaaattgctcactattgatcatgattactggcatggatggaccttatttgagatattgagatatgcacctcagcacaactgggttgcatacgaggaagcccttaaaagaaatccagttttggctaaaatggttatcagtggagtggtttactctgttggggattggattgcacagtgctatgaagggaagcctctttttgaaatcgatcgtgcacgtatgttgagatcaggcttagttggattcacgctacatggatccctctctcattattattatcagttttgtgaggcactgtttcctttcgaagattggtgggtggttcctgtcaaggttgcctttgatcaaactgtttggtcagcaatttggaacagcatctacttcacagttttgggaattttacgttttgaatcccctcttgccattttcagtgaattgaaggctacgttcttgccaatgttgactgctggttggaagctgtggccatttgctcatctaattacatatggtgtaattccggttgaacaaaggcttctttgggttgactgtgtggaactcatttgggtgacaatactctcaacttattcaaatgagaaatcagaatctagagtctctgaggtgattgtagaagcagaggcgcaacctccctcgataagcccaccacaggagtaa

SEQ ID NO: 65 - protein, 371 aa, Solanum tuberosum
MATINGLTSPQPFLSLQKSNSKPFLSLSKPMKSQFLFKGLKQQNQQLRDWAVVGSVTNEADVIPVQSTDVTDQQNGVVIGLEREPELGGGEMDIVNQVVGGFGNEGRLSFEGAGGFSSASGVGGSDVEKLIDRAINATIVLAAGSFAITKLLTIDHDYWHGWTLFEILRYAPQHNWVAYEEALKRNPVLAKMVISGVVYSVGDWIAQCYEGKPLFEIDRARMLRSGLVGFTLHGSLSHYYYQFCEALFPFEDWWVVPVKVAFDQTVWSAIWNSIYFTVLGILRFESPLAIFSELKATFLPMLTAGWKLWPFAHLITYGVIPVEQRLLWVDCVELIWVTILSTYSNEKSESRVSEVIVEAEAQPPSISPPQE

SEQ ID NO: 66 - DNA, 1026 bp, Arabidopsis lyrata
atggcagctctctgttgtcctaccaccatcatcgtctccgggaagctttcttcacggattaaaaccgcatgtcaattacccagaatcaacccttttaagaatcggaaacgattgattacagagagaaggaacttgatcgttaaatcgatcattgaagacagagaagcagtcgatgttaaaaatgaaaatttcaagccagaggaagaacaaacagaagatacagatcagctgatgagtcgaggaatcaacgcagccatagttctcgccgccggtaccgttgcggttactaagctcttaaccatcgatcatgactattggcaaggttggactctctacgagatacttaggtatgcacctgaacacaattgggttgcgtatgaacaaattctcaaaacaaacccagttttggcgaaaatggcgattagtggaattgtgtattctttaggagattggattgcacaatgttatgaaggaaaaccgctgtttgagtttgatcgagctcgtgttcttagatcaggtcttgttggattcactctccatggatcactctctcactattactaccaattctgtgaggctctctttccttttcaagaatggtgggtagtccctgcaaaagtcgcctttgatcaaaccatttggtctgcaatttggaacagtatctactttaccgttttagggctcttgcgtttccaatctccagctgacattttcagcgaaatcaagacaacattttggccaatgctcaccgcaggctggaaactctggccattggctcacttggttacatacggtgtaattcctgtagaccaaaggcttctttgggttgattgtatagaactcatatgggtcactattttgtcgacttactcaaacgaaaaagctgaggcgcaagcatcaggggaaacaaattcaagttctcactcaagcgaggtttgccagcttcttgagcgtctgaatgttcttcctgtgtgttcatcttgtgcctgcaaatacttgacaggattaggcgatgtcagcatgtag

SEQ ID NO: 67 - protein, 341 aa, Arabidopsis lyrata
MAALCCPTTIIVSGKLSSRIKTACQLPRINPFKNRKRLITERRNLIVKSIIEDREAVDVKNENFKPEEEQTEDTDQLMSRGINAAIVLAAGTVAVTKLLTIDHDYWQGWTLYEILRYAPEHNWVAYEQILKTNPVLAKMAISGIVYSLGDWIAQCYEGKPLFEFDRARVLRSGLVGFTLHGSLSHYYYQFCEALFPFQEWWVVPAKVAFDQTIWSAIWNSIYFTVLGLLRFQSPADIFSEIKTTFWPMLTAGWKLWPLAHLVTYGVIPVDQRLLWVDCIELIWVTILSTYSNEKAEAQASGETNSSSHSSEVCQLLERLNVLPVCSSCACKYLTGLGDVSM

SEQ ID NO: 68 - DNA, 954 bp, Arabidopsis thaliana
atggcagctctctgttgttgtcccaccaccatcatcgtctccgggaaggtttcttcacggattaaaaccgcaggcccattaccccgaatcaacccttttaagaatcagaaacgattgattacagagagaagaaacttgatcgttaaatcgatcattgaagacagagaagcaatcgatgttaaaaatgacaatttcaaggcagaggaagaactatcagaagataaagtagaagatacagatcggctgatgagtcgaggtatcaacgcagctatagttctcgccgccggtaccgttgcggttactaagcttttaaccattgatcatgactattggcaaggttggactctctacgagatacttaggtatgcacctgaacataattggtttgcgtatgaacaaattctcaaaacaaaccctgttttggcgaaaatggcgattagtggaattgtgtattctttaggagattggattgcacaatgttacgaaggaaaaccgctgtttgagtttgatcgaactcgtgttcttagatcaggtcttgttggattcacactccatggttcactgtctcactattactaccaattctgtgaggctctctttccttttcaagaatggtgggtagtccctgcaaaagtcgcatttgatcaaaccgtatggtctgcaatttggaacagtatctactttacagttttagggctcttgcgtttccaatctccagctgacattttcagcgaaatcaagacaacatttttgccaatgctcactgcaggctggaaactctggccattggcacacttggttacatacggtgtaatccctgtagaccaaaggcttctttgggtagattgtattgaactcatatgggtcactatattatcaacttactcgaacgaaaaagctgaggcgcaagcatcagaggaaacgaactccagttctcactcaagcgaggattag

SEQ ID NO: 69 - protein, 317 aa, Arabidopsis thaliana
MAALCCCPTTIIVSGKVSSRIKTAGPLPRINPFKNQKRLITERRNLIVKSIIEDREAIDVKNDNFKAEEELSEDKVEDTDRLMSRGINAAIVLAAGTVAVTKLLTIDHDYWQGWTLYEILRYAPEHNWFAYEQILKTNPVLAKMAISGIVYSLGDWIAQCYEGKPLFEFDRTRVLRSGLVGFTLHGSLSHYYYQFCEALFPFQEWWVVPAKVAFDQTVWSAIWNSIYFTVLGLLRFQSPADIFSEIKTTFLPMLTAGWKLWPLAHLVTYGVIPVDQRLLWVDCIELIWVTILSTYSNEKAEAQASEETNSSSHSSED

SEQ ID NO: 70 - DNA, 969 bp, Glycine max
atggctactgtttcttctctttgcgctgtttttcccatactcacaccaaccttgtcgaaaccccgcttggctcccctctcttgccgaatcccaaaacgacgtcgtatcagtatcatcacctctgttgccgaggatcgagaaatagttccggtgtctgaaggcagaggaacccgtttgaacgaagttgaggggtttcaaccttcggagcctcacacagagtcggaggttgttgtttcgagcctcacaagcagtagctccgtcaatgccatcatcgttttggggtttgggactttcgctgtcaccaagttgctcaccattgaccatgactactggcatggttggaccctttatgagattgtaaggtatatacctgaacacaattggattgcctatgagcaagctctgaaagcaaacccagttttggctaaaatggcaataagtgggattgtctactcaattggagactggattgctcagtgctatgaaggaaagcctctttttgagtttgatcggacacgggtactcagatcaggtcttgttgggtttactctccatggatcactttctcactattactaccaactttgtgaggctctttttcctttccaagaatggtgggttgtccctgctaaagttgctttcgaccaaactgtgtggtctgcaatttggaacagcatctactttgtggttttgggcttgttgcgttttgaatctttgactaacatatatggagaactgaagtcaacattcttgcccttgcttactgcagggtggaaactttggccttttgcgcatctgattacttatggtgtgattcctgtggaacaaaggcttctttgggtggactgtgtggagctcatctgggtcacaatactttcaacctattcaaatgagaaatcagaagctcgaatatctgaggcagcatcagaaacagggtcatccacttcaagcgaaaattccaaggaataa

SEQ ID NO: 71 - protein, 322 aa, Glycine max
MATVSSLCAVFPILTPTLSKPRLAPLSCRIPKRRRISIITSVAEDREIVPVSEGRGTRLNEVEGFQPSEPHTESEVVVSSLTSSSSVNAIIVLGFGTFAVTKLLTIDHDYWHGWTLYEIVRYIPEHNWIAYEQALKANPVLAKMAISGIVYSIGDWIAQCYEGKPLFEFDRTRVLRSGLVGFTLHGSLSHYYYQLCEALFPFQEWWVVPAKVAFDQTVWSAIWNSIYFVVLGLLRFESLTNIYGELKSTFLPLLTAGWKLWPFAHLITYGVIPVEQRLLWVDCVELIWVTILSTYSNEKSEARISEAASETGSSTSSENSKE

SEQ ID NO: 72 - DNA, 1230 bp, Glycine max
atggctactgtttcttctccttgtactgttttccccatacttacatcaaccttgtcgaagccccacttggctcccctctcttgccgaacccaaaaacgaagtcgtgtcagtatcatcacctctgtcgccgaggatcgagaaatagttccggtgtccgaagatagaggaattcgtttgaacgaagttgatggatttcaaccttcggagcctcacacagagtcagatgttgttgttcctcgcctcacaagcagtagtaccgtcaatgccatcatcgttttggggtttgggactttcgctgtcaccaagttgctcaccattgaccatgactactggcatggttggacactttttgagattgtaaggtatatacctgaacacaattggattgcctatgagcaagctctgaaagcaaacccggttttggctaaaatggcaataagtggaattgtctactcaattggagactggattgctcagtgctatgaaggaaagcctctttttgagtttgatcggacacgcgtactcagatcaggtcttgttgggtttactctccatggatcactttctcactattactaccaactttgtgaggctctttttcctttccaagaatggtgggttgttcctgctaaagttgcttttgaccaaactgtatggtctgcaatttggaatagcatctacttcgtggttttgggcttgttgcgttttgaatctttgactaacatatatggtgaactgaagtcaacattcttgcccttgcttactgcagggtggaaactttggccttttgcgcatctgattacttatggtgtgattcctgtggaacaaaggcttctttgggtggactgtgtggagctcatctgggtcacaatactttcaacctattcaaatgagaaatcagaagcacgaatatctgaggcagcatcagaaacagggtcatccacttcaagcgaaaattccaaggatatatacacttacaccttacacaggtcgtgcatccttctggctaagatcaactattcagcaatagccgcggtgaagatcggaaccctccactctacgctctgctctgcaatggcgaagatcgaagaactgaacgaatccatccccaaatcgaagaataagaggaatcacggctccaccacgttctttgtctttgtcgattaccttttcattttgttcttcctcggattcctctgcttcatcgttttcaagattctcagcatttga

SEQ ID NO: 73 - protein, 409 aa, Glycine max
MATVSSPCTVFPILTSTLSKPHLAPLSCRTQKRSRVSIITSVAEDREIVPVSEDRGIRLNEVDGFQPSEPHTESDVVVPRLTSSSTVNAIIVLGFGTFAVTKLLTIDHDYWHGWTLFEIVRYIPEHNWIAYEQALKANPVLAKMAISGIVYSIGDWIAQCYEGKPLFEFDRTRVLRSGLVGFTLHGSLSHYYYQLCEALFPFQEWWVVPAKVAFDQTVWSAIWNSIYFVVLGLLRFESLTNIYGELKSTFLPLLTAGWKLWPFAHLITYGVIPVEQRLLWVDCVELIWVTILSTYSNEKSEARISEAASETGSSTSSENSKDIYTYTLHRSCILLAKINYSAIAAVKIGTLHSTLCSAMAKIEELNESIPKSKNKRNHGSTTFFVFVDYLFILFFLGFLCFIVFKILSI

SEQ ID NO: 74 - DNA, 969 bp, Glycine max
atggctactgtttcttctccttgtactgttttccccatacttacatcaaccttgtcgaagccccacttggctcccctctcttgccgaacccaaaaacgaagtcgtgtcagtatcatcacctctgtcgccgaggatcgagaaatagttccggtgtccgaagatagaggaattcgtttgaacgaagttgatggatttcaaccttcggagcctcacacagagtcagatgttgttgttcctcgcctcacaagcagtagtaccgtcaatgccatcatcgttttggggtttgggactttcgctgtcaccaagttgctcaccattgaccatgactactggcatggttggacactttttgagattgtaaggtatatacctgaacacaattggattgcctatgagcaagctctgaaagcaaacccggttttggctaaaatggcaataagtggaattgtctactcaattggagactggattgctcagtgctatgaaggaaagcctctttttgagtttgatcggacacgcgtactcagatcaggtcttgttgggtttactctccatggatcactttctcactattactaccaactttgtgaggctctttttcctttccaagaatggtgggttgttcctgctaaagttgcttttgaccaaactgtgtggtctgcaatttggaatagcatctactttgtggttttgggcttgttgcgttttgaatctttgactaacatatatggagaactgaagtcaacattcttgcccttgcttactgcagggtggaaactttggccttttgcgcatctgattacttatggtgtgattcctgtggaacaaaggcttctttgggtggactgtgtggagctcatctgggtcacaatactttcaacctattcaaatgagaaatcagaagctcgaatatctgaggcagcatcagaaacagggtcatccacttcaagcgaaaattccaaggaataa

SEQ ID NO: 75 - protein, 322 aa, Glycine max
MATVSSPCTVFPILTSTLSKPHLAPLSCRTQKRSRVSIITSVAEDREIVPVSEDRGIRLNEVDGFQPSEPHTESDVVVPRLTSSSTVNAIIVLGFGTFAVTKLLTIDHDYWHGWTLFEIVRYIPEHNWIAYEQALKANPVLAKMAISGIVYSIGDWIAQCYEGKPLFEFDRTRVLRSGLVGFTLHGSLSHYYYQLCEALFPFQEWWVVPAKVAFDQTVWSAIWNSIYFVVLGLLRFESLTNIYGELKSTFLPLLTAGWKLWPFAHLITYGVIPVEQRLLWVDCVELIWVTILSTYSNEKSEARISEAASETGSSTSSENSKE

SEQ ID NO: 76 - DNA, 972 bp, Helianthus annuus
atggctaccgtgaacaatcatgtcgtcttcttctccggccacaaaatctctccacccacaaaccccatctcatattcaacgaccttctcgatctctcctccgactaaattgttttctcaatcgagaaagaatcataaagtatacccagtgatgaaatcaattgcggaggataaagaggtggtggcagatgaacaaaatggaagtgaaagggagagtggagttgtgggagaagggtctgaaggaattgacaagtttgcgagtaaagcgattaatgcttcgattgttcttgggtttggtactcttgctgtcaccaggttgctcaccattgatcatgagtactggcatggatggaccctttatgaaatacttagatatgctcccgagcacaattggattgcttatgaagaagctcttaaagaaaatcccgttttggctaagatggtgattagtgggatcgtttattctttgggcgattggattgcacaatgttacgaagggaagccgctatttgagtttgataggatccgcttgtttcggtcgggccttgttgggttcactctccatggatctctttctcattactattaccagttatgtgaggcccttattccgtttaaagattggtgggtcgttcctgcaaagatcgcatttgaccaaaccgtgtggtcagcagtgtggaacagcatctattttgatgtcttggggttgctgcgtttcgagtcccctgcaaatatattcaatgaactgaaaacaacattcttgccattgttgacggctggatggaaactatggccatttgcacacttagtaacctacggtttgattccggtggagcaaagacttctttgggtggactgtgtggagctcgtatgggtaactatactctctacgtactcgaatgagaaatcagaaacaaggatttcagatacaagttcagaagtagacccaaacagcccatcaaagaaacactaa

SEQ ID NO: 77 - protein, 323 aa, Helianthus annuus
MATVNNHVVFFSGHKISPPTNPISYSTTFSISPPTKLFSQSRKNHKVYPVMKSIAEDKEVVADEQNGSERESGVVGEGSEGIDKFASKAINASIVLGFGTLAVTRLLTIDHEYWHGWTLYEILRYAPEHNWIAYEEALKENPVLAKMVISGIVYSLGDWIAQCYEGKPLFEFDRIRLFRSGLVGFTLHGSLSHYYYQLCEALIPFKDWWVVPAKIAFDQTVWSAVWNSIYFDVLGLLRFESPANIFNELKTTFLPLLTAGWKLWPFAHLVTYGLIPVEQRLLWVDCVELVWVTILSTYSNEKSETRISDTSSEVDPNSPSKKH

SEQ ID NO: 78 - DNA, 957 bp, Helianthus paradoxus
atgatgtcgtacttcttctccggccacaaagtctctccacccacaaaccccatctcatattcaacgaccttctcgatctctcctccgactaaattgttttctcaatcgaaacagaatcataaagtatacccagtgatgaaatcaattgcggaggataaagaggtggtggcagatgaacaaaatggaagtgaaagggagagtggagttgtgggagcagggtctgaaggaattgacaagtttgcgagtaaagcgattaatgcttcgattgttcttgggtttggtactcttgctgtcaccaggttgctcaccattgatcatgagtactggcatggatggaccctttatgaaatacttagatatgctcccgagcacaattggattgcttatgaagaagctcttaaagaaaatcccgttttggctaagatggtgattagtgggatcgtttattctttgggcgattggattgcacaatgttacgaagggaagccgctatttgagtttgataggacccgcttgtttcggtcaggccttgttgggttcactctccatggatctctttctcattactattaccggttatgtgaggccctttttccgtttaaagattggtgggtcgttcctgcaaagatcgtgtttgaccaaaccgtgtggtcagcagtgtggaacagcatctattttgttgtcttggggttgctgcgcttcgagtccccttcaaatatattcaatgaactcaaaacaacattcttgccattgttgacggctggatggaaactatggccatttgcacacttagtaacctacggtttgattccggtggagcaaagacttctttgggtggactgtgtggagctcgtatgggtaactatactctctacgtactcgaatgagaaatcagaaacaaggatttcagatacaagttcagaagtagacccaaacagtccatcaaagaaacactaa

SEQ ID NO: 79 - protein, 318 aa, Helianthus paradoxus
MMSYFFSGHKVSPPTNPISYSTTFSISPPTKLFSQSKQNHKVYPVMKSIAEDKEVVADEQNGSERESGVVGAGSEGIDKFASKAINASIVLGFGTLAVTRLLTIDHEYWHGWTLYEILRYAPEHNWIAYEEALKENPVLAKMVISGIVYSLGDWIAQCYEGKPLFEFDRTRLFRSGLVGFTLHGSLSHYYYRLCEALFPFKDWWVVPAKIVFDQTVWSAVWNSIYFVVLGLLRFESPSNIFNELKTTFLPLLTAGWKLWPFAHLVTYGLIPVEQRLLWVDCVELVWVTILSTYSNEKSETRISDTSSEVDPNSPSKKH

SEQ ID NO: 80 - DNA, 912 bp, Malus domestica
atggctacccttaacacgatcgcagctcacaacctcccttcaccctcaacctcctccttcgccacccaatctcacaaacccaactcgctttcacccttcttctgcacccaaacctccagcaaaccccacccaccacggcttccggccttcccgaccaggaaaaaacgaagctggattgttagatcgatcacggaggacagagaggtggttcccttgaagaagaaggatacaggggaacaagatagcagcttgctgcttaatgggtcgggagaatttcaagctctttcgacaccatcggaggagaaaggagagggggatgatttggataagctgacgagcagagctattaatgcgttaattgttctgggatttgggacctttgcggtctctaagttgctcacaatcgaccacgattattggcatggatggacactttatgagatactaagatatgtaccggaacacaattggattgcatatgaacaggctctcaaagcaaatcccgtttttgccaaaatggtgataagtggggttgtctatactctaggagattggattgctcaatgttttgaagggaagccgcttttggagtttgaccggaaacgtatgttcagatcaggccttgttggctttactttccatggatctctttcccattattattaccaattttgtgaggctctttttcctttggaggattggtgggtggtccctgccaaaatagcctttgatcaaacagtctggtcagcgatttggaacagcatctattttgtggttttggggttcttgcgtttcgaatccccaaccaagatttttgatgaacttgagggctacatttgtgccaatgctgacagcgggatggaaactttggccatttgctcatgtggttacgtatggcctgatccctgttga

SEQ ID NO: 81 - protein, 303 aa, Malus domestica
MATLNTIAAHNLPSPSTSSFATQSHKPNSLSPFFCTQTSSKPHPPRLPAFPTRKKRSWIVRSITEDREVVPLKKKDTGEQDSSLLLNGSGEFQALSTPSEEKGEGDDLDKLTSRAINALIVLGFGTFAVSKLLTIDHDYWHGWTLYEILRYVPEHNWIAYEQALKANPVFAKMVISGVVYTLGDWIAQCFEGKPLLEFDRKRMFRSGLVGFTFHGSLSHYYYQFCEALFPLEDWWVVPAKIAFDQTVWSAIWNSIYFVVLGFLRFESPTKIFDELEGYICANADSGMETLAICSCGYVWPDPC

SEQ ID NO: 82 - DNA, 1077 bp, Oryza sativa
atggcggcgatggcggcggccgtggcctcgtccccctccccctcccccgcctccacccgcctcctccgcggccaccacccgcccccgtcgtgctcggcgccgtcgctgctccgcctgaccaggtcgtcgcggaggctacggctgcgcgccgcggcggcggcggaggaggccgacgtgctccccgggcctggggccgagggggagatggcgacgggcgggaggctggaggagcaacccgaggggccgatcgggggcagccaggtcgacatcggcgggctcgccttccagggcgacatgggcggaggagggttcgccggcgggagcgggggcgccggggccggcggcggggacggcaacaagatgctcgaccgcggcatcaacacggccatcgtgctcggcgccagcacctacgccctcaccaagctcctcaccgtcgaccacgactactggcatggatggacgatctttgagatcttgcggtacatgcccgagcacaactggtcggcttacgaggaggccctcaagaccaacccggtgcttgccaagatgatgattagtggcgtcgtctactccctcggcgactggattgcgcagtgctacgaaggcaagccgatcttcgagttcgaccgtgctcggatgttccggtctggcctcgtcgggttcacgcttcacgggtccctttcacattactactaccatttctgcgaggcactgtttccattcaaggattggtgggttgttcccgcaaaggttgtgttcgatcagacggcctggtctgcgatatggaacagtatctacttcgtggtcttggggttccttcgtttggaatcaccggccactatttccagtgagctcaaatccacgttttggcccatgcttactgccggctggaagttgtggccttttgcacacttggttacatatggcctagttcctgttgaacaaagacttctgtgggttgactgcgtggagttaatctgggttacaatactgtcaacttactccaacgagaaatctgaagcaaggaactccgaggacgcatccacatcaaatgcttccaatgacaattcaatatag

SEQ ID NO: 83 - protein, 358 aa, Oryza sativa
MAAMAAAVASSPSPSPASTRLLRGHHPPPSCSAPSLLRLTRSSRRLRLRAAAAAEEADVLPGPGAEGEMATGGRLEEQPEGPIGGSQVDIGGLAFQGDMGGGGFAGGSGGAGAGGGDGNKMLDRGINTAIVLGASTYALTKLLTVDHDYWHGWTIFEILRYMPEHNWSAYEEALKTNPVLAKMMISGVVYSLGDWIAQCYEGKPIFEFDRARMFRSGLVGFTLHGSLSHYYYHFCEALFPFKDWWVVPAKVVFDQTAWSAIWNSIYFVVLGFLRLESPATISSELKSTFWPMLTAGWKLWPFAHLVTYGLVPVEQRLLWVDCVELIWVTILSTYSNEKSEARNSEDASTSNASNDNSI

SEQ ID NO: 84 - DNA, 1302 bp, Physcomitrella patens
atggcaggtgttggtcctgcgtgtgtgagatctgtggcaagtcagggtttcggagctccatgcgtggggctgccgcagaggaataggggtgtgagaggtctcagcggctgtgggttgccagagagagtctcttctggcaagttttgttcttcgtctggaaagggtggattctttgcggggaagaaggacgggttctccatcagatgctccagcttgcctggagatggtgttgctgcaggtaccccgaaaactgtgattaaaagctcctgttccaaaattttgcgttggtccgaagaggacgttgtgagctcgggaggtgttcctgttgtacaagccttacccgatgacgcagagacgcatagtggcgcaaatgggatgctggtggagttgcgtgagaccgacaggccgcagccaattggaagtggcacgtatgggtccggaaatcagttgagtatggagatggctgtaaacgaggcgcagaccatgaccgcaaccatgtacaggcccaagctgctttggtttaccaaatctgaggatgaagaaagtagattacttgataggacgttcaacgctctcttggctggggctgccatatcgtacgctgttactaaagccgtcaccgttgatcacgatgtctggcatgggtggactgtatttgaggttctcaagtatgcccctctccacaactggcatgcgtatgaggaatttcttagtgctaatccagttctggcgaagatgatgatcagtggagttgtgtactcgattggagattggattgggcagtgtgtagagggaaaaccggttctcgagttcagcagagtcaggcttctgagatcaggtcttgttggattttgccttcacggctctttgtcacactactactatcacgtttgcgagtttttgtttccgtttcaaggatggtgggtagtcccagtgaaagtagcattcgaccagaccatctggtcggctatttggaatagtatctacttcataactctaggattgcttcgatttgagtctcccgttaggatactcaaggatttaagagaaacattcttccctcttttgacggctggctggaagctgtggccctttgcgcatcttatcacgtatggtttggttcccgtcgaacagcgtctgctgtgggtagactgtgtggagattctttgggttactattctctctgtatttgccaacgagaaagctcagcagagaatggaaataagtgaagtagagacagtggcagtgttaagctctggagacgcagtagagcagaaactccccattgaagattcccaataa

SEQ ID NO: 85 - protein, 433 aa, Physcomitrella patens
MAGVGPACVRSVASQGFGAPCVGLPQRNRGVRGLSGCGLPERVSSGKFCSSSGKGGFFAGKKDGFSIRCSSLPGDGVAAGTPKTVIKSSCSKILRWSEEDVVSSGGVPVVQALPDDAETHSGANGMLVELRETDRPQPIGSGTYGSGNQLSMEMAVNEAQTMTATMYRPKLLWFTKSEDEESRLLDRTFNALLAGAAISYAVTKAVTVDHDVWHGWTVFEVLKYAPLHNWHAYEEFLSANPVLAKMMISGVVYSIGDWIGQCVEGKPVLEFSRVRLLRSGLVGFCLHGSLSHYYYHVCEFLFPFQGWWVVPVKVAFDQTIWSAIWNSIYFITLGLLRFESPVRILKDLRETFFPLLTAGWKLWPFAHLITYGLVPVEQRLLWVDCVEILWVTILSVFANEKAQQRMEISEVETVAVLSSGDAVEQKLPIEDSQ

SEQ ID NO: 86 - DNA, 1074 bp, Panicum virgatum
atggcggcggcagcggccgtggcgaccgtgtcctccccatcccccgcctccaggcggctgctcccctcctcctcctccgcggtcccgtccctcctccggctcccgcggccgggcaggcggctccggcgcgcgctgcgggtcgtctcggcggggggcgaggcggacgtgctgccggggccggggggcgaggcggaggcagcggtgccggggaggctcgaggagccgcgggacgagccgctgggggggagccagctcgacatcggcgggctcgccttccagggcgacgtgggcgggggcttcgccggcggcgggggcggggtcggctccggggcctccggcggcgggggaggcaacaagacgctggaccgcgggatcaacacggccatcgtgctcggggccagcaccttcgcgctcaccaagctcctcaccgtcgaccaggactactggcatgggtggacgatctttgagatcctccggtacatgcccgagcacaactggtcggcatacgaggaggctctcaaggccaacccggttctggccaagatgatgatcagtggcgtagtctactccctcggtgattggatcgcgcagtgctacgaaggcaagccaatctttgatttcgaccgtgctcggatgttccgatctgggcttgttgggttcactcttcatgggtcactttctcattactattaccatatctgtgaggcactgttcccattcaaggattggtgggttgtccctgcaaaggttgcattcgatcagacgatctggtctgcaatttggaacagcatctactttgtggtcttgggttttcttcggttggaatcacctaccactatctacaaagagctcaagtccacattctggcccatgcttacggctgggtggaagttatggccttttgcgcacttgattacatatggtgtgattcctgttgagcaaaggcttctatgggttgactgtgtggagctagtctgggtcacgatactgtcaacatactcaaatgagaagtcggaggcaaggaattccgatggtacgtccacaccagatacttcgaaggacaactctagatag

SEQ ID NO: 87 - protein, 357 aa, Panicum virgatum
MAAAAAVATVSSPSPASRRLLPSSSSAVPSLLRLPRPGRRLRRALRVVSAGGEADVLPGPGGEAEAAVPGRLEEPRDEPLGGSQLDIGGLAFQGDVGGGFAGGGGGVGSGASGGGGGNKTLDRGINTAIVLGASTFALTKLLTVDQDYWHGWTIFEILRYMPEHNWSAYEEALKANPVLAKMMISGVVYSLGDWIAQCYEGKPIFDFDRARMFRSGLVGFTLHGSLSHYYYHICEALFPFKDWWVVPAKVAFDQTIWSAIWNSIYFVVLGFLRLESPTTIYKELKSTFWPMLTAGWKLWPFAHLITYGVIPVEQRLLWVDCVELVWVTILSTYSNEKSEARNSDGTSTPDTSKDNSR

SEQ ID NO: 88 - DNA, 1104 bp, Sorghum bicolor
atggcggcggcgtcggcgtccgtggcgaccgtggcctccccatcatcccccgcatccaggcggctgctgctccccctcccctcctccgccgcgccgtctctcctccggctcccttcgaggccggccaggcggctccggcgcgcccgcgccctgcgggtcgccgcggcgggggacgaggcggacgtgctgcctggcccgggggccgagggggaggcggcggtgcccgggaccgggaggctggaggagcagcgggacgagcccccgctggggggaagccagctcgacatcggagggctcgccttccagggcgacgtcggcgggggattcaccggcggcgggtcgggctccgggtccggggcctccggcggtggcgacggcaacaagatgctggaccggggcatcaacacggccatcgtgctcggggccagcacctacgcgctcaccaagctgctcaccgtcgaccaggactactggcatggatggacgatcttcgagatcctgcgatatatgccggagcacaactggtccgcatacgaggaggccctcaaagccaacccggttctagccaagatgatgatcagtggcgtcgtctactcccttggtgactggattgcacagtgctacgaaggcaagccaatctttgatttcgaccgtgctcggatgttccggtctggccttgttgggttcacgcttcatgggtcactttcacattactactaccatatctgtgaggcactgttcccattcaaggactggtgggttgtccctgcaaaggttgcattcgatcagaccatctggtctgcaatctggaacagtatctacttcgtggtcttgggtttccttcggttggaatcacctaccactatctacggcgagctcaagtccacattctggcccatgcttaccgctggatggaagttgtggccttttgcgcacttagttacatatggtgtggttcctgttgagcaaagacttctatgggtcgactgtgtggaacttgtctgggtcacaatattgtcgacttactcaaacgaaaagtcagaggcaaggaattctgacagtacctccacaccagctgcttcatcaaaggacaactcacgatag

SEQ ID NO: 89 - protein, 367 aa, Sorghum bicolor
MAAASASVATVASPSSPASRRLLLPLPSSAAPSLLRLPSRPARRLRRARALRVAAAGDEADVLPGPGAEGEAAVPGTGRLEEQRDEPPLGGSQLDIGGLAFQGDVGGGFTGGGSGSGSGASGGGDGNKMLDRGINTAIVLGASTYALTKLLTVDQDYWHGWTIFEILRYMPEHNWSAYEEALKANPVLAKMMISGVVYSLGDWIAQCYEGKPIFDFDRARMFRSGLVGFTLHGSLSHYYYHICEALFPFKDWWVVPAKVAFDQTIWSAIWNSIYFVVLGFLRLESPTTIYGELKSTFWPMLTAGWKLWPFAHLVTYGVVPVEQRLLWVDCVELVWVTILSTYSNEKSEARNSDSTSTPAASSKDNSR

SEQ ID NO: 90 - DNA, 1056 bp, Zea mays
atggcagcggcggccgtggcgactgtggccaccccatcccccgcctccaggcggctgttcccctccgccggcccgtctcttctccggctcccaaggccgaccaagcggctccggcgcgccctgcggttcgccgctgcgggggatgaagcggacgtgctgcctggcccgggggccgagggggaggccgtggtgcccgggaggctggaggagcagccggacgagcagctgggcggaagccagctcgacatcggagggctcgccttccagggcgacgtgggcgggggcttcaccggcggcggagcgggctccggggcctccggcggtggcggcggcaacaagatgctggaccggggcatcaacacggccatcgtgctcggggccagcacctacgctctcaccaagctgctcaccgtcgaccaggactactggcatgggtggacgatcttcgagatcctgcgctatatgccggagcacaactggtccgcatacgaggaggccctcaaagccaacccggttctagccaagatgatgatcagcggtgtcgtctactcccttggtgactggattgcacagtgctacgaaggcaagccgatatttgatttcgaccgtgctaggatgttccggtctggccttgttgggttcacgcttcatgggtcactttcacattactactaccatatatgcgaggcactgttcccattcaaggattggtgggttgtccctgcaaaggttgcattcgatcagaccatctggtctgcgatctggaacagtatctactttgtggtcttgggtttccttcggttggaatcacctaccactatctacaacgagctcaagtccacattctggcccatgcttactgctggatggaagttgtggccttttgcgcacttagttacatatggtgtggttcctgttgagcaaagacttctatgggtcgactgtgtggagcttgtctgggtcacaatactgtcgacttattcaaacgaaaagtcagaggcaaggaattctgatagtacctccacaccagcggcttcaaaggacaactccacatag

SEQ ID NO: 91 - protein, 351 aa, Zea mays
MAAAAVATVATPSPASRRLFPSAGPSLLRLPRPTKRLRRALRFAAAGDEADVLPGPGAEGEAVVPGRLEEQPDEQLGGSQLDIGGLAFQGDVGGGFTGGGAGSGASGGGGGNKMLDRGINTAIVLGASTYALTKLLTVDQDYWHGWTIFEILRYMPEHNWSAYEEALKANPVLAKMMISGVVYSLGDWIAQCYEGKPIFDFDRARMFRSGLVGFTLHGSLSHYYYHICEALFPFKDWWVVPAKVAFDQTIWSAIWNSIYFVVLGFLRLESPTTIYNELKSTFWPMLTAGWKLWPFAHLVTYGVVPVEQRLLWVDCVELVWVTILSTYSNEKSEARNSDSTSTPAASKDNST

SEQ ID NO: 92 - DNA, 1062 bp, Zea mays
atggcggccgctgccgtggcgaccgtggcctccccatcccccgctgcctccaggcgtatgctcccctccgccgcaccgtctttcctccggctcccgaggccgaccagccggctccggcgcgccacgcaggtcgccgcggcggggggagaggcggacgtgctgcctggtccgggggccgagggtgaggcggcggttccggggaggctggaggagcagcgggacgagccgctggcgggaagccagctcgacatcggagggctcgccttccagggcgacgtcggcgggggcttcaccggcggcggagcgggctccggggcctccggcggtggcggcgacggcaacaagatgctggaccggggcatcaatacggccatcgttctcgcggccagcacctacgcgctcaccaagctgctcaccgtcgaccaggactactggcacgggtggacgatcttcgagatcctgcgctatatgccggagcacaactggtccgcgtacgaggaggccctcaaagctaacccggttctagccaagatgatgatcagtggtgtcgtctactcccttggtgactggattgcacagtgctacgaaggcaagccaatctttgatttcgaccgtgctcggatgttccggtctggtcttgttgggttcactcttcatgggtcactttcacattactactaccatatctgtgaggcactattcccattcaaggattggtgggttgtccctgcaaaggttgcattcgatcagaccgtttggtctgcaatctggaacagtatctacttcgtggtcttaggtttccttcggttggaatcacctaccactatctacagtgaactcaagtctacattctggcccatgcttaccgctggatggaagttgtggccttttgcacacttaattacatatggtgtggtccctgttgagcaaagacttctatgggtcgactgtgtggagcttgtctgggtcacaatattgtcgacgtactcaaacgaaaagtcagaggcaaggaattctgatagcacctccacaccagatgcttcaaaggacaactccagatag

SEQ ID NO: 93 - protein, 353 aa, Zea mays
MAAAAVATVASPSPAASRRMLPSAAPSFLRLPRPTSRLRRATQVAAAGGEADVLPGPGAEGEAAVPGRLEEQRDEPLAGSQLDIGGLAFQGDVGGGFTGGGAGSGASGGGGDGNKMLDRGINTAIVLAASTYALTKLLTVDQDYWHGWTIFEILRYMPEHNWSAYEEALKANPVLAKMMISGVVYSLGDWIAQCYEGKPIFDFDRARMFRSGLVGFTLHGSLSHYYYHICEALFPFKDWWVVPAKVAFDQTVWSAIWNSIYFVVLGFLRLESPTTIYSELKSTFWPMLTAGWKLWPFAHLITYGVVPVEQRLLWVDCVELVWVTILSTYSNEKSEARNSDSTSTPDASKDNSR

SEQ ID NO: 94 - DNA, 711 bp, Triphysaria sp.
atgctactattgtgttggctgctggatcttttgccattaccaagctgcttaccattgatcatgattattggcatggatggacccttttttgaaatattgagatacgcaccccaacacaactggagtgcttacgaagaagcccttaaagcaaacccagtattagcgaaaatggtaattagtggagtagtttattccgttggagattggattgcacagtgctatgaggggaagcctatatttgaatatgatcgtgcacgaatgttccgatccggtctagtcggatttactcttcacggatcgctttctcattattattatcagttctgtgaggcattatttccacttcatgattggtgggtcgttcctgctaaagtgatctttgatcagacagcgtggtctgcagtttggaacagcatttactttacgcttttaggcgttttacgacttgaatcgcctgttaatatatttaataagtggaaggctacatttttccccatgttaactgcgggatggaagctttggccatttgctcatctaataacctatggagtgatccctgtcgaacaaaggcttctttgggttgattgtgtggaactcatttgggtgactatattgtccacttactcaaatgaaaaatctgaagctagaatatccgaagcaccagtcgaagctaatgcgagtttaccaccaccagagggtccatttgagtaa

SEQ ID NO: 95 - protein, 236 aa, Triphysaria sp.
MLLLCWLLDLLPLPSCLPLIMIIGMDGPFFEILRYAPQHNWSAYEEALKANPVLAKMVISGVVYSVGDWIAQCYEGKPIFEYDRARMFRSGLVGFTLHGSLSHYYYQFCEALFPLHDWWVVPAKVIFDQTAWSAVWNSIYFTLLGVLRLESPVNIFNKWKATFFPMLTAGWKLWPFAHLITYGVIPVEQRLLWVDCVELIWVTILSTYSNEKSEARISEAPVEANASLPPPEGPFE

SEQ ID NO: 96 - DNA, 1137 bp, Vitis vinifera
atggcgactctaaacaccatcactgcccataggcttttcccactccccaaatccattacagaatcaaataactcatatacagtttgtatctctacctcctcttcccaactcttcctcaacaaatcaaacccatcactgaattcaactttctcaaagaagaagagactcaactgggtcatcaacgcagttgcagaggatcaagacttggctccagcacagacaagtggttcaaaagtccatcaagatgaagatttgcctcgctcatcgcttgatgggtctgaagattctgagggtttatcatcatcatcagtttcttctcagggaaaaggagataactatgagtttgataggttgaggagtaaaacaattaatgctacaattgttctagctggtggtactcttgcaatcactagattgctaaccattgatcatgattactggcatgggtggactctatacgaggtattgaggtatgcgcccgagcacaattgggttgcctacgaagaagctctgaagacgaatcctgttttagccaaaatggcaataagtggagctgtctactcaattggggattggattgcacaatgctacgaaggaaaacctctttttgagtttgatcttacacgtatgctcagatcaggccttgttggattttctctccacgggtccctttctcattattattaccagttctgtgaggctcttttcccttccaaggattggtgggtggtccctgctaaagttgtcgttgaccaaactgtgtgggcggccatatggaacagcatctactatgtggctttgggattcttgcggcgggaatcaccggccaatatttatggtgaagtgaaatcaacattttggccgatgttgactgcagggtggaagctttggccgtttgctcatctgataacctatggtgtgattccagtggagcaaaggcttctctgggtcgactgtgtggagctcatttgggttaccatactgtccacttactcaaatgagaagtcagaagcaagaataacagaggctacacaggaagcaaattccaggtcatcgaacaatgcagaggtaagcccggtttctgagttccgcaaacagcaccaccaagctctctcaatagagcatcatgcatcatga

SEQ ID NO: 97 - protein, 378 aa, Vitis vinifera
MATLNTITAHRLFPLPKSITESNNSYTVCISTSSSQLFLNKSNPSLNSTFSKKKRLNWVINAVAEDQDLAPAQTSGSKVHQDEDLPRSSLDGSEDSEGLSSSSVSSQGKGDNYEFDRLRSKTINATIVLAGGTLAITRLLTIDHDYWHGWTLYEVLRYAPEHNWVAYEEALKTNPVLAKMAISGAVYSIGDWIAQCYEGKPLFEFDLTRMLRSGLVGFSLHGSLSHYYYQFCEALFPSKDWWVVPAKVVVDQTVWAAIWNSIYYVALGFLRRESPANIYGEVKSTFWPMLTAGWKLWPFAHLITYGVIPVEQRLLWVDCVELIWVTILSTYSNEKSEARITEATQEANSRSSNNAEVSPVSEFRKQHHQALSIEHHAS

SEQ ID NO: 98 - DNA, 1149 bp, Aquilegia
atggctgcttctgtaaatagtctaacacctcaaagatttcttcatccactttcatcaaaacccattaacaaggaatcaaaactaagcaaatccaactttccattaaagggtatctcaaagaattcaacatttttgagaacaaacaatagaaattggattattgggtctattaaagaagaaattgatgtaattccagttcaaagtaatgatttaatagatcaacaagaaggggttttggttagaattgaaatagaaagaaatgaagaacaaagtgttcatcaagttggtggatttgctaatgaaggaaggtttttatttgaaggagctggagagattaatgggttttcttcttctttgtcgtcgtcatcttcggctagtgttgtatcagaagtgattggaaatgaagaagaagatgttgagatgttgattgatagagctataaatgcagttattgttcttgctgcagggacttatgctattactaagttgcttactattgatagagattattggcatggttggactatttttgagatattaagatacgcacccctgcacaactgggctgcttatgaagaagctttaaaagaaaatcctgttttagccaaaatggtcataagtggagtggtctactctctgggggattggattgcacagtgctatgaagggaaacctctttttgattttgatcggacgcgcatgttcagatcaggccttgttggattctctcttcatggctctctttctcattattattaccagttctgtgaggctttattccctttccaagactggtgggtggttcctgttaaggttgtctttgaccaaactgcatgggcagcattatggaacagcatatactatgtagtactcgggttattgcgtttcgaatccccagccagcattttcactgaactaaaagcaacatttattcccatgctgactgcaggatggaagctctggccttttgctcatctaattacgtacggtgttgttccagtagaacaaagacttctttgggttgattgtgtggagcttatttgggttacaatactctccacattgtcaaatgagaaatcagaagcaagaacctctgaagcatcattggaagtgaactctagtaccctatcaattaacgctgaggaataa

SEQ ID NO: 99 - protein, 382 aa, Aquilegia
MAASVNSLTPQRFLHPLSSKPINKESKLSKSNFPLKGISKNSTFLRTNNRNWIIGSIKEEIDVIPVQSNDLIDQQEGVLVRIEIERNEEQSVHQVGGFANEGRFLFEGAGEINGFSSSLSSSSSASVVSEVIGNEEEDVEMLIDRAINAVIVLAAGTYAITKLLTIDRDYWHGWTIFEILRYAPLHNWAAYEEALKENPVLAKMVISGVVYSLGDWIAQCYEGKPLFDFDRTRMFRSGLVGFSLHGSLSHYYYQFCEALFPFQDWWVVPVKVVFDQTAWAALWNSIYYVVLGLLRFESPASIFTELKATFIPMLTAGWKLWPFAHLITYGVVPVEQRLLWVDCVELIWVTILSTLSNEKSEARTSEASLEVNSSTLSINAEE

SEQ ID NO: 100 - DNA, 1128 bp, Glycine max
atggcgtcggtccacagcaccgtcgctccccgtaccttcctgccgtcaattcccaagccgagagctcctcttcacgccgcaaagttcgtcgccggcggcgcgcacaactttcggagactgtcgcgcaacctcattctctccggaaacaaacgcgcggtggcggcgaactcggctgcggaggagttcgacgtgatatcggtgcagagcgacgacatcaccgaccagcaggagggcgtggtggtgagccgcgtcgagatggaaggcggagactgcgaattggcgacgcaggtgagcggattcggagccaacgagggcttgctgtcgttggaagggttttcttcatcttcgtcgtcgtcttcgtctctggtcgggaatgagagcgaggaggacatggagaagctaattgatagaactatcaatgctacgattgtgctcgccgctggcactttcgccgtcaccaaacttctcacgattgatagcgattactggcatggatggacgctatacgagatactaagatatgcgcctcagcacaactggtctgcttatgaggaagctcttaagacaaatccagttcttgccaagatgatgattagtgggattgtttactctataggggactggattgcacagtgctttgaaggaaaacctctgtttgagtttgaccgtgcacggatgttcagatcggggcttgttggttttactcttcatggttctctttctcatttctattatcagttttgcgaggagctatttccttacaaagaatggtgggtagttcctgccaaagttgccttcgatcaaactgcatggtcagcactttggaacagcatatattatacggttgttgcactactgcgtcgtgatcctcctatgagtattttaaatgaattgaaggcgacgttttttcccatgctaacggcaggatggaagctatggccatttgcccatctcattacttatggtgtgataccggttgagcaaagacttctctgggtggataccatagagcttatttgggtgaccatactttccacattttcaaatgaaaaatcagaagcaagaaactctcagtctatggtgccttcagaagtgaaatccacatctgtttatcctcctgaggagtaa

SEQ ID NO: 101 - protein, 375 aa, Glycine max
MASVHSTVAPRTFLPSIPKPRAPLHAAKFVAGGAHNFRRLSRNLILSGNKRAVAANSAAEEFDVISVQSDDITDQQEGVVVSRVEMEGGDCELATQVSGFGANEGLLSLEGFSSSSSSSSSLVGNESEEDMEKLIDRTINATIVLAAGTFAVTKLLTIDSDYWHGWTLYEILRYAPQHNWSAYEEALKTNPVLAKMMISGIVYSIGDWIAQCFEGKPLFEFDRARMFRSGLVGFTLHGSLSHFYYQFCEELFPYKEWWVVPAKVAFDQTAWSALWNSIYYTVVALLRRDPPMSILNELKATFFPMLTAGWKLWPFAHLITYGVIPVEQRLLWVDTIELIWVTILSTFSNEKSEARNSQSMVPSEVKSTSVYPPEE

SEQ ID NO: 102 - DNA, 1131 bp, Glycine max
atggcgtcggtccccagcaccgtcgctccccgcaccttcctgccgtcgattcccaagccgagagctcctcttcacgccgcgaaatccgtcgccagcgccgcgcgcaacttcccgagactttcgcacaacctcattctctccggaaacaaacgcgcggtggcggtgaactcggcgtcggaggagttcgacgtgatatcggtgcagagcgaggacattaccgaccagcaggagggcgtcgtggtgagccgcgtcgagatggaaggtggagacggcgaattggcgacgcaggtgagccgattcggcgcgaacgagggtttgctgtcgttggaagggttttcttcttcgtcttcgccgtcgtcttcgtctctgatcgggagtgagagcgtggacatggagaagctaattgatagaactatcaatgctacgattgtgctcgcagctggcactttcgccgtcaccaaacttctcaccattgatagtgattactggcacggatggacgctatatgagatactaagatatgcacctcagcataactggtctgcttacgaggaagctcttaagacaaatcctgttcttgccaagatgatgattagtgggattgtttactccttaggggactggattgcgcagtgcgttgaaggaaaacctctgtttgagtttgaccgtgcgcggatgttcagatcagggcttgttggttttactcttcatggttctctttctcatttctattatcagttttgcgaggagctatttccttacaaagaatggtgggtagtacctgccaaagttgccttcgatcaaactgcatggtctgcactttggaacagcatatattatactgttgttgcattactgcgtcttgatcctcctatgagtattttaaatgaattgaaggcaacgtttttccccatgttgacggccggatggaagctatggccatttgcccatctcattacttatggtgtgataccggttgaacaaagactcctctgggtggataccattgagcttatttgggtgaccatactttccacattttcaaatgaaaaatcagaagcaagaaactctcagtctatggtgccttcagaggtgaaatccaccacatatgttcatcctcctgaggagtaa

SEQ ID NO: 103 - protein, 376 aa, Glycine max
MASVPSTVAPRTFLPSIPKPRAPLHAAKSVASAARNFPRLSHNLILSGNKRAVAVNSASEEFDVISVQSEDITDQQEGVVVSRVEMEGGDGELATQVSRFGANEGLLSLEGFSSSSSPSSSSLIGSESVDMEKLIDRTINATIVLAAGTFAVTKLLTIDSDYWHGWTLYEILRYAPQHNWSAYEEALKTNPVLAKMMISGIVYSLGDWIAQCVEGKPLFEFDRARMFRSGLVGFTLHGSLSHFYYQFCEELFPYKEWWVVPAKVAFDQTAWSALWNSIYYTVVALLRLDPPMSILNELKATFFPMLTAGWKLWPFAHLITYGVIPVEQRLLWVDTIELIWVTILSTFSNEKSEARNSQSMVPSEVKSTTYVHPPEE

SEQ ID NO: 104 - DNA, 1131 bp, Glycine max
atggcgtcggtccccagcaccgtcgctccccgcaccttcctgccgtcgattcccaagccgagagctcctcttcacgccgcgaaatccgtcgccagcgccgcgcgcaacttcccgagactttcgcacaacctcattctctccggaaacaaacgcgcggtggcggtgaactcggcgtcggaggagttcgacgtgatatcggtgcagagcgaggacattaccgaccagcaggagggcgtcgtggtgagccgcgtcgagatggaaggtggagacggcgaattggcgacgcaggtgagccgattcggcgcgaacgagggtttgctgtcgttggaagggttttcttcttcgtcttcgtcgtcgtcttcgtctctggtcgggaatgagagcgaggaggacatggagaagctaattgatagaactatcaatgctacgattgtgctcgcagctggcactttcgccgtcaccaaacttctcaccattgatagcgattactggcatggatggacgctatatgagatactaagatatgcacctcagcacaactggtctgcttacgaggaagctcttaagacaaatcctgttcttgccaagatgatgattagtgggattgtttactctttaggggactggattgcacagtgctttgaaggaaaacctctgtttgagtttgaccgtgcacggatgttcagatcggggcttgttggttttactcttcatggttctctttctcatttctattatcagttttgcgaggagctatttccttacaaagaatggtgggtagttcctgccaaagttgccttcgatcaaactgcatggtcagcactttggaacagcatatattatacggttgttgcactactgcgtcgtgatcctcctatgagtattttaaatgaattgaaggcgacgttttttcccatgctaacggcaggatggaagctatggccatttgcccatctcattacttatggtgtgataccggttgagcaaagacttctctgggtggataccatagagcttatttgggtgaccatactttccacattttcaaatgaaaaatcagaagcaagaaactctcagtctatggtgccttcagaagtgaaatccacatctgtttatcctcctgaggagtaa

SEQ ID NO: 105 - protein, 376 aa, Glycine max
MASVPSTVAPRTFLPSIPKPRAPLHAAKSVASAARNFPRLSHNLILSGNKRAVAVNSASEEFDVISVQSEDITDQQEGVVVSRVEMEGGDGELATQVSRFGANEGLLSLEGFSSSSSSSSSSLVGNESEEDMEKLIDRTINATIVLAAGTFAVTKLLTIDSDYWHGWTLYEILRYAPQHNWSAYEEALKTNPVLAKMMISGIVYSLGDWIAQCFEGKPLFEFDRARMFRSGLVGFTLHGSLSHFYYQFCEELFPYKEWWVVPAKVAFDQTAWSALWNSIYYTVVALLRRDPPMSILNELKATFFPMLTAGWKLWPFAHLITYGVIPVEQRLLWVDTIELIWVTILSTFSNEKSEARNSQSMVPSEVKSTSVYPPEE

SEQ ID NO: 106 - DNA, 1149 bp, Gossypium raimondii
atggcgtctcttcaccccacgatatctcctcaaagcctcctttctttaacaaagccacgaaaacccatttcgaggcacctctcagcttcctcattaaccacctcaaaactgcccgagggccttgctttctcgggaaccaaacagaaaaacaaaagggcaaactcggtggtggtggtgaagtcattagccgaggagcttgacgtgataccagttcaaagtgaggatgttacagatatgcaagaaggagttgcggtgagtcaggtgccgagagaatcgccaggaggagagttagtgactcaagtaggtgggtttagcaatgaaggaatgttatcttttgaaggggtttcttcttcaggttcaccttcagggaacggatttggtgatggacaaggaagtcaagaggaattggataggcttatagatagaactattaatgctactattgttcttgctgctggtacttatgccatcaccaagttgcttaccattgatcagaattattggcagggatggactatttatgagatagtaagatatgcacctcaacacaattggagtgcttatgaagaagctttgaggacaaaccctgttttagcgaaaatggttatcagtggaatcgtctattctataggggattggatcgctcaatgctttgaaggtaaacctctctttgagtttgatcgtatgcggatgttcagatctggccttgttggctttactctacacggttccttgtctcattactattaccaattctgtgaggagctttttcctttccaagactggtgggtggttcctgtgaaagtagctttcgaccaaactgcatgggctgcagtttggaacagcatttactttgtggttttgggatttctgcgtcttgaatctccgatcagtatttttaacgaatggaaggcaacattcttgcctatgttgacagccggatggaaactttggccatttgctcatcttatcacttatggttttattccggtagaacaaaggcttctttgggtggactgcgtagaacttatttgggtgacgattctctcaacttattcgaatgaaaaatcggaagcaagaatctccgaggcagcaccagcagaagcaagttcaattttgccacccgttggtccacccgagctggagtaa

SEQ ID NO: 107 - protein, 382 aa, Gossypium raimondii
MASLHPTISPQSLLSLTKPRKPISRHLSASSLTTSKLPEGLAFSGTKQKNKRANSVVVVKSLAEELDVIPVQSEDVTDMQEGVAVSQVPRESPGGELVTQVGGFSNEGMLSFEGVSSSGSPSGNGFGDGQGSQEELDRLIDRTINATIVLAAGTYAITKLLTIDQNYWQGWTIYEIVRYAPQHNWSAYEEALRTNPVLAKMVISGIVYSIGDWIAQCFEGKPLFEFDRMRMFRSGLVGFTLHGSLSHYYYQFCEELFPFQDWWVVPVKVAFDQTAWAAVWNSIYFVVLGFLRLESPISIFNEWKATFLPMLTAGWKLWPFAHLITYGFIPVEQRLLWVDCVELIWVTILSTYSNEKSEARISEAAPAEASSILPPVGPPELE

SEQ ID NO: 108 - DNA, 1074 bp, Helianthus argophyllus
atggctgctgcttccattaacacctcatttaaacccctttacaaacccaccaaagatttcaaatcttttgtacccatttcaccaacgcccaaattactaacaaaatccaagaatctcgccggcgccggagctgtaaaggcggtggcgaaggagcaggatgtgattccggtgaagagtgatgatcaaattggaaacttgataagtgagattgaaggggatgaagcaggggttcagttgattggtgggtttggtgggagtgatggaagattgtcatttgaaggtgggttttcatcggcggcgagtggtagtggtggtgaggtggttgaaggggagactagtgttgagaagttgatagatagaggtattaatgctgcaattgttttggctgctgggacttttgggattactaagatgctcactattgattatgattattggcatggttggaccttattcgaaatactgagatacgcacctcaacacaattggagtgcatacgaagaagctcttaaacaaaatccacttttggcaaaaatgataataagtggagttgtatattcaataggagattggattgcacagtgttgtgaaggaaaaccacttttggagttcgatcgcactcgcatgtttaggtccggtcttgtgggcttcactcttcacgggtcactttctcactactactattatttctgtgaggcacttttcccctttcaagattggtgggtggtacccgttaaggtggcgttcgaccaaactgcctgggcagcagtatggaatagcatttatttcgtagttgtggcacttttacggtttgaatcaccgttgactatttttaatgaattaaaggcgacgttttttcccatgttgactgctggctggaagctttggccgtttgctcacattataacgtatggtgtcgtacctattgaacaaagactcttgtgggtcgattgtgttgagctgatttgggtcacaatactttcaactttatcaaatgagaaatcagaagcaaggatatcagatgcacccacagacccgaatacaatctcagattttgaaccttcggaggaatag

SEQ ID NO: 109 - protein, 357 aa, Helianthus argophyllus
MAAASINTSFKPLYKPTKDFKSFVPISPTPKLLTKSKNLAGAGAVKAVAKEQDVIPVKSDDQIGNLISEIEGDEAGVQLIGGFGGSDGRLSFEGGFSSAASGSGGEVVEGETSVEKLIDRGINAAIVLAAGTFGITKMLTIDYDYWHGWTLFEILRYAPQHNWSAYEEALKQNPLLAKMIISGVVYSIGDWIAQCCEGKPLLEFDRTRMFRSGLVGFTLHGSLSHYYYYFCEALFPFQDWWVVPVKVAFDQTAWAAVWNSIYFVVVALLRFESPLTIFNELKATFFPMLTAGWKLWPFAHIITYGVVPIEQRLLWVDCVELIWVTILSTLSNEKSEARISDAPTDPNTISDFEPSEE

SEQ ID NO: 110 - DNA, 1086 bp, Lactuca sativa
atggccgctgcttccattagtacgaccttcctccccctctacaaacccatcaaatccttcgtacccatttcacaagcacctaaattcttcaccaaaaccaagcacggcgccggcgccggcaccgtcagggcggtttccaaggagcaagacgtgatacccgtacagagtaatgactttacggatcatcaagttggtatcctggtgagtgaaattgagagggaggttgaaggtggaaaagacgttcaattgattagtgggttcggtggtagtgaaggaagattgtcttttgaaggtgggttttcgtctgcgagctcttccggtgatggaaatcaggtagtcgaaggtgataatctcgataaattgatcgatagaaccatcaacgccaccattgttcttgccgctggtactttcggtatcaccaaattgctcaccatcgattacgattattggcatggatggaccatatttgaaatattgagatacgcaccacaacacaactggagtgcatacgaagaagctcttaaagaaaacccacttttggctaagatgatgataagtggagttgtatattcagtaggcgattggattgcacagtgctgtgaaggtaaaccactcttggagtttgatcgcacacgcatgtttagatctggccttgttggcttcactctacatggatcactttctcactactactactatttctgtgaggcacttttcccgtttcaagattggtgggtggtgcctgtgaaggtagcgtttgaccaaaccgcatggtcagcagtatggaacagtatttactacatggtcatcggtcttttacgatttgaatcaccggttactatttttagtgaattaaagtcgactttttggcctatgttgacagctggttggaagctttggccatttgctcacattattacatatggtgttgtacctgttgaacaaagattattgtgggtggattgtgttgagctcatttgggtcacaatactttcaactttatcaaatgagaaatcagaagcaagggttttagatgcaccaatagaccagagttcaagttcatcgtttgagccttctgaggagtaa

SEQ ID NO: 111 - protein, 361 aa, Lactuca sativa
MAAASISTTFLPLYKPIKSFVPISQAPKFFTKTKHGAGAGTVRAVSKEQDVIPVQSNDFTDHQVGILVSEIEREVEGGKDVQLISGFGGSEGRLSFEGGFSSASSSGDGNQVVEGDNLDKLIDRTINATIVLAAGTFGITKLLTIDYDYWHGWTIFEILRYAPQHNWSAYEEALKENPLLAKMMISGVVYSVGDWIAQCCEGKPLLEFDRTRMFRSGLVGFTLHGSLSHYYYYFCEALFPFQDWWVVPVKVAFDQTAWSAVWNSIYYMVIGLLRFESPVTIFSELKSTFWPMLTAGWKLWPFAHIITYGVVPVEQRLLWVDCVELIWVTILSTLSNEKSEARVLDAPIDQSSSSSFEPSEE

SEQ ID NO: 112 - DNA, 1020 bp, Prunus persica
atggcttccatccactccatagctccccagagcttcctccctctcccaaactccaaacccagaaaacccactaatgctcacccaaaacccatcttaagctccaatctttgtaactccaaactctcaaagaaccaaactttcctgagaaacaaacggaaagacaggtggattttgaagtctctggttgatcaagaagagtgtgatgtgatcccagttcagagcactgactgtacggaccagcaggaagggatggctgtgtgcagggtggagtgtgaaggtgtggagggcgagttggcgagtcaggtaggtgggtttggagcaagtgagggaaggctttcctttgaaggagctggtgggtttggatcttctggggttggaaatgagagggagagtgaggaatttgagaggctcgtagataggactatcaatgccactattgtgctcgcagctggtacttttgctatcactaagttgctcactattgatcaggattactggcatggttggactctgtatgagatcctaagatatgcacctcaacacaactggagtgcttatgaggaagctctcaagactaacccagttttagccaaaatggtgattagtggtgtggtgtattctgtaggggattggattgcacagtgctttgaaggaaaacctctatttgagttcgatcgtacacgaatgctcaggtcaggtcttgttggatttactctccatggttccctctctcactactattaccacccctgcgaggagcttattccattccaagactggtgggtggttcctgccaaagtagccttcgaccaaacagtatgggcagcaatttggaacagcatttactttaccgctctgggatttttgcgtttcgaatcacccatcgacatttttagtgaactgaaagcgacattctggcccatgctaactgctgggtggaaactttggcccattgcgcatcttggttacctatggggtgaacccctgtcaaacaaaggtcttattgggtggaccgtgtaa

SEQ ID NO: 113 - protein, 339 aa, Prunus persica
MASIHSIAPQSFLPLPNSKPRKPTNAHPKPILSSNLCNSKLSKNQTFLRNKRKDRWILKSLVDQEECDVIPVQSTDCTDQQEGMAVCRVECEGVEGELASQVGGFGASEGRLSFEGAGGFGSSGVGNERESEEFERLVDRTINATIVLAAGTFAITKLLTIDQDYWHGWTLYEILRYAPQHNWSAYEEALKTNPVLAKMVISGVVYSVGDWIAQCFEGKPLFEFDRTRMLRSGLVGFTLHGSLSHYYYHPCEELIPFQDWWVVPAKVAFDQTVWAAIWNSIYFTALGFLRFESPIDIFSELKATFWPMLTAGWKLWPIAHLGYLWGEPLSNKGLIGWTV

SEQ ID NO: 114 - DNA, 1107 bp, Poncirus trifoliata
atggcctctctttctcctcagacactcctctctatctcaaaaccaaacaaacccaactcaaaacagctgccaagcaacgcttgcctcctctcaaaactttcccagaaccccaatttctctagaaacaaacagagaaagttgaacagctgggtggtaaactcggtggtaaatgaagagcttgacgtgcttccggtacagagccaggaccttacggacatgcaagagggtgtagtggtggggcaagaggaggatggcgagttggcgagtcaggtgagtcaagttagcgcgttcagtgatggaacgttgtcgtttgacggattctcttctgcttcttcagcttctgctgatgaaagaagagggaatgaagaaatagagagattgattgatagaactattaatgctactattgtgcttgctgttggaacttttgcaatcaccaagttgctcactattgatcaagattactggcatggttggacaatttttgaaatagtaagatatgcacctctacacaactggactgcttatgaggaagccctgaagacgaacccggttttagcgaaaatggtgatcagcggcgtggtctattctctaggagactggattgcgcagtgcttcgaaggaaaacctttatttgagtttgaccgtactcgaatgtttagatcaggccttgtgggtttcactctgcatggttccctttctcattactattaccagttttgtgaggaattatttccttttcaagattggtgggtggttcctgccaaagtagcctttgaccaaactgcttgggcagcagcttggaacagtatctattttacggttttgggattattgcgacttgaatctccattcagtatttttagtgagttgaaggcaacattctggccaatgctgacggcagggtggaagctttggccatttgctcatcttgttacctatggtctggtcccagtagaacaaaggcttctttgggtggactgtgtagaacttatttgggtgacaatactttcaacatattcgaatgaaaaatcagaagcaaggattgctgaggcaccagcagaagtaaaaccctgtttgcctgatataagtcctcccgaggagtga

SEQ ID NO: 115 - protein, 368 aa, Poncirus trifoliata
MASLSPQTLLSISKPNKPNSKQLPSNACLLSKLSQNPNFSRNKQRKLNSWVVNSVVNEELDVLPVQSQDLTDMQEGVVVGQEEDGELASQVSQVSAFSDGTLSFDGFSSASSASADERRGNEEIERLIDRTINATIVLAVGTFAITKLLTIDQDYWHGWTIFEIVRYAPLHNWTAYEEALKTNPVLAKMVISGVVYSLGDWIAQCFEGKPLFEFDRTRMFRSGLVGFTLHGSLSHYYYQFCEELFPFQDWWVVPAKVAFDQTAWAAAWNSIYFTVLGLLRLESPFSIFSELKATFWPMLTAGWKLWPFAHLVTYGLVPVEQRLLWVDCVELIWVTILSTYSNEKSEARIAEAPAEVKPCLPDISPPEE

SEQ ID NO: 116 - DNA, 1137 bp, Phaseolus vulgaris
atgacctctgtccatagcaccgtcgctccccgtgccttcctgccttcgatttccaagcccaagccgagggctcctcacacgaaatccttcgccggcggcgtggtgcacgactttccgagattttctcggagctgcattttctcgggaaacaattgtgcggtggcggcgaacgcggcgggggatgatttaaacgtgatatcggtgaagagcgacgatattacggaccagcaggagggcgtgttggtgagtcgcgtcgagattgatggcgtagacagcgaattggcgactcagataaacggattcggagcgaaagatggtttgttgtcgttggaagggttttcttcttcctcttcgacgtctacttcagcgttggttgggagtgagagcgaggaggacgtggagaagctgattgataggactatcaacgctacgattgtgctcgccgctggtgctttcgccatcaccaaacttcttaccattgatagtgattactggcatggatggacgctatatgagatactaagatacgcacctcagcacaactggtctgcttatgaggaagctcttaagacaaatcctgttcttgccaagatgatgattagtgggattgtttactccgtaggggactggattgcacagtgctttgaaggaaaacctctgtttgagtttgaccgagcgcggatgttcagatcgggaattgttggttttactcttcatggttctctttctcattactattactatttttgcgaggacctatttccttacaaagaatggtgggtggttcctgccaaagttgcctttgatcaaactgcttggtcagcaatttggaacagcatatattatacagttgttgcgttactacgtcttgatcctcctatcagtattttaaatgaattgaaggctacgttttttcccatgttgacggcaggttggaagctgtggccatttgcacatctcataacttatggtgtgataccagttgagcaaagacttctctgggtggataccgtagagcttgtatgggtgaccatactttcaacattttcaaatgaaaaatcagaagcaaaaagctccgagtctatgatgcctacagaagtgatatccaccacatctgttcaacctcctgaggagtaa

SEQ ID NO: 117 - protein, 378 aa, Phaseolus vulgaris
MTSVHSTVAPRAFLPSISKPKPRAPHTKSFAGGVVHDFPRFSRSCIFSGNNCAVAANAAGDDLNVISVKSDDITDQQEGVLVSRVEIDGVDSELATQINGFGAKDGLLSLEGFSSSSSTSTSALVGSESEEDVEKLIDRTINATIVLAAGAFAITKLLTIDSDYWHGWTLYEILRYAPQHNWSAYEEALKTNPVLAKMMISGIVYSVGDWIAQCFEGKPLFEFDRARMFRSGIVGFTLHGSLSHYYYYFCEDLFPYKEWWVVPAKVAFDQTAWSAIWNSIYYTVVALLRLDPPISILNELKATFFPMLTAGWKLWPFAHLITYGVIPVEQRLLWVDTVELVWVTILSTFSNEKSEAKSSESMMPTEVISTTSVQPPEE

SEQ ID NO: 118 - DNA, 1161 bp, Theobroma cacao
atggcgtcccttcacacgacgataactccacaaggcctcctttatttatcaaagtctggaaatcccatttctaggcaggcctcagcttccccgttaaccagctcaaagcttcccgagagccttactttctcgagaaacaaatggagaaagaacagcaacaggaaggccaactcggtggtggtgaactcattagctgaggagcttgatgtgataccagtgcaaagtgaggatgttactgacatgcaagaaggagtcgcggtgagtcaggtggagagtgaaccagcaggaggagagttagcgagtcaagtaggtgggtttggcaatgaaggaaggttatcttttgaaggattttctgcttcaggttcagcttcggggagtggatttggagatggagaaggaggtgcggaggatatggagaagcttatagatagaactattaatgctactattgtccttgctgctggtacttttgcccttaccaagttgcttaccattgatcataattattggcagggatggacgctttatgagatactaagatatgcacctcaacataactggagtgcttatgaggaagttttgaagacaaaccctgttttagcaaaaatggttattagtggagttgtctattccctaggggattggattgcacagtgctttgaagggaaacctctctttgagtttgatcgtacgcgaatgttcagatctggccttgttggctttactctacatggttccctgtctcattactattaccaattctgtgaggagctttttccctcccaagactggtgggtggttcctgcaaaagtagtttttgaccaaactgcatgggcagcagtttggaatagcatttactttacagttttgggatttttgcggcttgaatctccaatcagtatttttaatgaattgaaggcaacattctggcctatgctgactgctggatggaagctttggccgtttgctcatcttatcacttatggtgttataccagtcgaacaaaggcttctttgggtggactgtgtagaacttatttgggtgacaattctctcaacttattcaaatgaaaaatcggaagcaaggatcgcagaggcaccagcagaagctaattcaagtttgccacccgttggtccatctgaggagcaagtaatgagataa

SEQ ID NO: 119 - protein, 386 aa, Theobroma cacao
MASLHTTITPQGLLYLSKSGNPISRQASASPLTSSKLPESLTFSRNKWRKNSNRKANSVVVNSLAEELDVIPVQSEDVTDMQEGVAVSQVESEPAGGELASQVGGFGNEGRLSFEGFSASGSASGSGFGDGEGGAEDMEKLIDRTINATIVLAAGTFALTKLLTIDHNYWQGWTLYEILRYAPQHNWSAYEEVLKTNPVLAKMVISGVVYSLGDWIAQCFEGKPLFEFDRTRMFRSGLVGFTLHGSLSHYYYQFCEELFPSQDWWVVPAKVVFDQTAWAAVWNSIYFTVLGFLRLESPISIFNELKATFWPMLTAGWKLWPFAHLITYGVIPVEQRLLWVDCVELIWVTILSTYSNEKSEARIAEAPAEANSSLPPVGPSEEQVMR

SEQ ID NO: 120 - DNA, 876 bp, Vitis vinifera
atggggttttggcgagaattgaggtggaagaagagggggaactggtgggtgggttctctggtgaagggaggttttctttcagggcttttcttcttcggacagggtgaggctgaggatgttgagaggttgattgatagaagtatcaatgcaacgattgtgctagctgctgggagttttgccgtcaccaaattgcttaccatcgatgctgattactggcatggatggacgatttttgagatcctaaggtatgcaccccaacacaactggagtgcttatgaagaagctcttaagacaaacccagtttttgccaaaatggttataagtggagtggtctactctttaggggattggattgcacagtgctatgaaggaaaacctctttttgagtttgaccgtgctcggatgttgagatcaggccttgtcggtttcaccctacatggatcactttcccattattattaccagttttgcgaggcacttttccctttccaagactggtgggttgttcctgctaaagtagcctttgaccaaactctatgggctgctgtttggaatagcatttattatacagttgtgggatttttgcgttttgattccccagccaatgtttttggtgaattgagggcaacattctggcccatgctgactgccggatggaaactttggccatttgctcaccttattacatatggcgtgatcccagtagaacaaaggctcctgtgggtggactgtgtagagctcatttgggtgacaatcctttcaacttactcaaatgagaaatcagaagcaagagtatctgaagcatcagcagaagcagcttctaattctccaccaacaggttctcctgaggtatgtcaattaaatgttttgttctga

SEQ ID NO: 121 - protein, 291 aa, Vitis vinifera
MGFWRELRWKKRGNWWVGSLVKGGFLSGLFFFGQGEAEDVERLIDRSINATIVLAAGSFAVTKLLTIDADYWHGWTIFEILRYAPQHNWSAYEEALKTNPVFAKMVISGVVYSLGDWIAQCYEGKPLFEFDRARMLRSGLVGFTLHGSLSHYYYQFCEALFPFQDWWVVPAKVAFDQTLWAAVWNSIYYTVVGFLRFDSPANVFGELRATFWPMLTAGWKLWPFAHLITYGVIPVEQRLLWVDCVELIWVTILSTYSNEKSEARVSEASAEAASNSPPTGSPEVCQLNVLF

SEQ ID NO: 122 - DNA, 1095 bp, Cichorium intybus
atggccgctgcttccattagtacgaccttcctccccctccacaaacctatcaaagatttcaaatctttcgtacctgcttcacaaaaacccaaattcttgaccaaaaccaagcacggcgccggcgccgttaccgtgaaggcggtttccaaggagcaagacgtgattcccttacagagcaacgactttacggatcatcaagttggtatcctggtgagtgaaattgaaagggaggttgaaggaggaaaagacgtgcaattgatcggtgggttcggtggtagtgaaggaagattgtcttttgaaggtggtttttcgtctgcaagttcttccggtgatggaaatcagatggttgaaggtgaaaatcttgataaattgatggatagaaccattaacgctaccattgttcttgccgctggtactttcggtattaccaaattgctcaccatcgattacgattattggcatggatggacaatttttgaaatactaagatacgcacctcaacacaactggagtgcatacgaagaagctcttaaagaaaacccacttttggcaaagatgatgataagcggtgtcgtatattcaataggcgattggatcgcacagtgctgtgaaggaaaaccactcttggagtttgatcgcactcgcatgtttaggtctggcctcgttggcttcactctacacggatcactttctcactattactactatttctgtgaggcactttttccgttccaagattggtgggtggtgccggttaaggtagcttttgatcaaaccgcatggtcagcaatatggaacagtatttactatatggtcattggtcttttacgatttgaatcaccggttactatatttaatgaattaagggcgacgttttggcctatgttaacagctggttggaagctttggccatttgctcacatcattacatatggtgtagtacccgttgaacaaagactcttgtgggttgattgtgttgagctcatttgggtcacaatactttcaactttatcgaatgagaaatcagaagcaaggattatagatgtaccagcagacacgaatcaaagttcatctttagaacatttagaggagtaa

SEQ ID NO: 123 - protein, 364 aa, Cichorium intybus
MAAASISTTFLPLHKPIKDFKSFVPASQKPKFLTKTKHGAGAVTVKAVSKEQDVIPLQSNDFTDHQVGILVSEIEREVEGGKDVQLIGGFGGSEGRLSFEGGFSSASSSGDGNQMVEGENLDKLMDRTINATIVLAAGTFGITKLLTIDYDYWHGWTIFEILRYAPQHNWSAYEEALKENPLLAKMMISGVVYSIGDWIAQCCEGKPLLEFDRTRMFRSGLVGFTLHGSLSHYYYYFCEALFPFQDWWVVPVKVAFDQTAWSAIWNSIYYMVIGLLRFESPVTIFNELRATFWPMLTAGWKLWPFAHIITYGVVPVEQRLLWVDCVELIWVTILSTLSNEKSEARIIDVPADTNQSSSLEHLEE

SEQ ID NO: 124 - DNA, 1146 bp, Gossypium hirsutum
atggcgtctcttcaccccacgatatctcctcaaagcctcctttctttaacaaaaccacgaaaacccatttcgaggcacctctcagcttcctcattaaccacctcaaaactgcccgagggccttgcgttctcgggaaccaaacagaaaaacaaaagggaaaactcggtggtggtggtgaagtcattagccgaggagcttgacgtgataccagttcaaagtgaggatgttacagatatacaagaaggagttgcggtgagtcaggcgccgagagaatcgtcaggaggagagttagtgactcaagtaggtgggtttagcaatgaaggaatgttatcttttgaaggggtttcttcttcaggttcaccttcagggaacggatttggtgatggacaaggaagtcaagaggaactggataggcttatagatagaactattaatgctactattgttcttgctgctggtacttatgccatcaccaagttgcttaccattgatcagaattattggcagggatggactatttatgagatagtaagatatgcacctcaacacaattggagtgcttatgaagaagctttgaggacaaaccctgttttagcgaaaatggttatcagtggaatcgtctattctataggggattggatcgcgcaatgctttgaaggtaaacctctctttgagtttgatcgtatgcggatgttcagatctggccttgttggctttactctacacggttccttgtctcattactattaccaattctgtgaggagctttttcctttccaagactggtgggtggttcctgtgaaagtagctttcgaccaaactgcatgggctgcagtttggaacagcatttactttgtggttttgggatttctgcgtcttgaatctccgatcagtatttttaacgaatggaaggcaacattcttgcctatgttgacagccggatggaaactttggccatttgctcatcttatcacttatggttttattccggtagaacaaaggcttctttgggtggactgcgtagaacttatttgggtgacgattctctcaacttattcgaatgaaaaatcggaagcaagaatctccgaggcagcaccagcagaagcaagttcaattttgccacccgttggtccacccgaggagtaa

SEQ ID NO: 125 - protein, 381 aa, Gossypium hirsutum
MASLHPTISPQSLLSLTKPRKPISRHLSASSLTTSKLPEGLAFSGTKQKNKRENSVVVVKSLAEELDVIPVQSEDVTDIQEGVAVSQAPRESSGGELVTQVGGFSNEGMLSFEGVSSSGSPSGNGFGDGQGSQEELDRLIDRTINATIVLAAGTYAITKLLTIDQNYWQGWTIYEIVRYAPQHNWSAYEEALRTNPVLAKMVISGIVYSIGDWIAQCFEGKPLFEFDRMRMFRSGLVGFTLHGSLSHYYYQFCEELFPFQDWWVVPVKVAFDQTAWAAVWNSIYFVVLGFLRLESPISIFNEWKATFLPMLTAGWKLWPFAHLITYGFIPVEQRLLWVDCVELIWVTILSTYSNEKSEARISEAAPAEASSILPPVGPPEE

SEQ ID NO: 126 - protein, 50 aa, Artificial sequence
  motif 1-2
  VARIANT (8)..(8): / replace = "Phe"
  VARIANT (16)..(16): / replace = "Ile"
  VARIANT (19)..(19): / replace = "Thr"
  VARIANT (22)..(22): / replace = "Leu"
  VARIANT (41)..(41): / replace = "His"
  VARIANT (45)..(45): / replace = "Glu"
  VARIANT (50)..(50): / replace = "Lys" / replace = "Glu"
GDWIAQCYEGKPLFEFDRARMFRSGLVGFTLHGSLSHYYYQFCEALFPFQ

SEQ ID NO: 127 - protein, 41 aa, Artificial sequence
  motif 2-2
  VARIANT (5)..(5): / replace = "Gln"
  VARIANT (13)..(13): / replace = "Ile"
  VARIANT (14)..(14): / replace = "Tyr"
  VARIANT (20)..(20): / replace = "Met"
  VARIANT (22)..(22): / replace = "Glu"
  VARIANT (26)..(26): / replace = "Ser" / replace = "Ile"
  VARIANT (30)..(30): / replace = "Gln"
  VARIANT (34)..(34): / replace = "Thr" / replace = "Ala"
LTIDHDYWHGWTLFEILRYAPQHNWVAYEEALKRNPVLAKM

SEQ ID NO: 128 - protein, 21 aa, Artificial sequence
  motif 3-2
  VARIANT (1)..(1): / replace = "Glu"
  VARIANT (7)..(7): / replace = "Val"
  VARIANT (15)..(15): / replace = "Ala"
  VARIANT (17)..(17): / replace = "Ala"
  VARIANT (19)..(19): / replace = "Val"
DWWVVPAKVAFDQTVWSAIWN

SEQ ID NO: 129 - protein, 50 aa, Artificial sequence
  motif 4-2
  VARIANT (16)..(16): / replace = "His"
  VARIANT (17)..(17): / replace = "Ile" / replace = "Leu"
  VARIANT (25)..(25): / replace = "Lys" / replace = "Glu"
  VARIANT (26)..(26): / replace = "Glu"
  VARIANT (32)..(32): / replace = "Val"
  VARIANT (40)..(40): / replace = "Ile"
LVGFTLHGSLSHYYYQFCEALFPFQDWWVVPAKVAFDQTVWSAIWNSIYF

SEQ ID NO: 130 - protein, 50 aa, Artificial sequence
  motif 5-2
  VARIANT (3)..(3): / replace = "Met"
  VARIANT (5)..(5): / replace = "Gln"
  VARIANT (9)..(9): / replace = "Ser" / replace = "Val"
  VARIANT (13)..(13): / replace = "Gln"
  VARIANT (17)..(17): / replace = "Arg"
  VARIANT (25)..(25): / replace = "Ala" / replace = "Met"
  VARIANT (29)..(29): / replace = "Ile"
  VARIANT (33)..(33): / replace = "Ile" / replace = "Val"
  VARIANT (46)..(46): / replace = "Ile"
  VARIANT (48)..(48): / replace = "Asp"
  VARIANT (49)..(49): / replace = "Ile"
RYAPEHNWIAYEEALKANPVLAKMVISGVVYSLGDWIAQCYEGKPLFEFD

SEQ ID NO: 131 - protein, 20 aa, Artificial sequence
  motif 6-2
  VARIANT (4)..(4): / replace = "Val"
  VARIANT (8)..(8): / replace = "Leu"
  VARIANT (9)..(9): / replace = "Val"
AHLITYGVIPVEQRLLWVDC

SEQ ID NO: 132 - protein, 50 aa, Artificial sequence
  motif 7-2
  VARIANT (9)..(9): / replace = "Val"
  VARIANT (17)..(17): / replace = "Gln"
  VARIANT (33)..(33): / replace = "Leu"
  VARIANT (48)..(48): / replace = "Glu"
  VARIANT (49)..(49): / replace = "Phe"
RYAPQHNWIAYEEALKRNPVLAKMVISGVVYSVGDWIAQCYEGKPLFEID

SEQ ID NO: 133 - protein, 50 aa, Artificial sequence
  motif 8-2
  VARIANT (11)..(11): / replace = "Phe"
  VARIANT (18)..(18): / replace = "Glu"
  VARIANT (23)..(23): / replace = "Ile"
  VARIANT (30)..(30): / replace = "Ala"
  VARIANT (48)..(48): / replace = "Tyr"
GFTLHGSLSHYYYQFCEALFPFQDWWVVPVKVAFDQTVWSAIWNSIYFTV

SEQ ID NO: 134 - protein, 50 aa, Artificial sequence
  motif 9-2
  VARIANT (2)..(2): / replace = "Trp"
  VARIANT (22)..(22): / replace = "Leu"
  VARIANT (23)..(23): / replace = "Ile"
  VARIANT (38)..(38): / replace = "Val"
FLPMLTAGWKLWPFAHLITYGVVPVEQRLLWVDCVELIWVTILSTYSNEK

SEQ ID NO: 135 - DNA, 2194 bp, Oryza sativa; identical to SEQ ID NO: 46

SEQ ID NO: 136 - DNA, 14853 bp, Artificial sequence
  expression vector
gacaggatatattggcgggtaaacctaagagaaaagagcgtttattagaataatcggatatttaaaagggcgtgaaaaggtttatccgttcgtccatttgtatgtgcatgccaaccacagggttcccctcgggatcaaagtatgaagagatcgaggcggagatgatcgcggccgggtacgtgttcgagccgcccgcgcacgtctcaaccgtgcggctgcatgaaatcctggccggtttgtctgatgccaagctggcggcctggccggccagcttggccgctgaagaaaccgagcgccgccgtctaaaaaggtgatgtgtatttgagtaaaacagcttgcgtcatgcggtcgctgcgtatatgatgcgatgagtaaataaacaaatacgcaaggggaacgcatgaaggttatcgctgtacttaaccagaaaggcgggtcaggcaagacgaccatcgcaacccatctagcccgcgccctgcaactcgccggggccgatgttctgttagtcgattccgatccccagggcagtgcccgcgattgggcggccgtgcgggaagatcaaccgctaaccgttgtcggcatcgaccgcccgacgattgaccgcgacgtgaaggccatcggccggcgcgacttcgtagtgatcgacggagcgccccaggcggcggacttggctgtgtccgcgatcaaggcagccgacttcgtgctgattccggtgcagccaagcccttacgacatatgggccaccgccgacctggtggagctggttaagcagcgcattgaggtcacggatggaaggctacaagcggcctttgtcgtgtcgcgggcgatcaaaggcacgcgcatcggcggtgaggttgccgaggcgctggccgggtacgagctgcccattcttgagtcccgtatcacgcagcgcgtgagctacccaggcactgccgccgccggcacaaccgttcttgaatcagaacccgagggcgacgctgcccgcgaggtccaggcgctggccgctgaaattaaatcaaaactcatttgagttaatgaggtaaagagaaaatgagcaaaagcacaaacacgctaagtgccggccgtccgagcgcacgcagcagcaaggctgcaacgttggccagcctggcagacacgccagccatgaagcgggtcaactttcagttgccggcggaggatcacaccaagctgaagatgtacgcggtacgccaaggcaagaccattaccgagctgctatctgaatacatcgcgcagctaccagagtaaatgagcaaatgaataaatgagtagatgaattttagcggctaaaggaggcggcatggaaaatcaagaacaaccaggcaccgacgccgtggaatgccccatgtgtggaggaacgggcggttggccaggcgtaagcggctgggttgtctgccggccctgcaatggcactggaacccccaagcccgaggaatcggcgtgagcggtcgcaaaccatccggcccggtacaaatcggcgcggcgctgggtgatgacctggtggagaagttgaaggccgcgcaggccgcccagcggcaacgcatcgaggcagaagcacgccccggtgaatcgtggcaagcggccgctgatcgaatccgcaaagaatcccggcaaccgccggcagccggtgcgccgtcgattaggaagccgcccaagggcgacgagcaaccagattttttcgttccgatgctctatgacgtgggcacccgcgatagtcgcagcatcatggacgtggccgttttccgtctgtcgaagcgtgaccgacgagctggcgaggtgatccgctacgagcttccagacgggcacgtagaggtttccgcagggccggccggcatggccagtgtgtgggattacgacctggtactgatggcggtttcccatctaaccgaatccatgaaccgataccgggaagggaagggagacaagcccggccgcgtgttccgtccacacgttgcggacgtactcaagttctgccggcgagccgatggcggaaagcagaaagacgacctggtagaaacctgcattcggttaaacaccacgcacgttgccatgcagcgtacgaagaaggccaagaacggccgcctggtgacggtatccgagggtgaagccttgattagccgctacaagatcgtaaagagcgaaaccgggcggccggagtacatcgagatcgagctagctgattggatgtaccgcgagatcacagaaggcaagaacccggacgtgctgacggttcaccccgattactttttgatcgatcccggcatcggccgttttctctaccgcctggcacgccgcgccgcaggcaaggcagaagccagatggttgttcaagacgatctacgaacgcagtggcagcgccggagagttcaagaagttctgtttcaccgtgcgcaagctgatcgggtcaaatgacctgccggagtacgatttgaaggaggaggcggggcaggctggcccgatcctagtcatgcgctaccgcaacctgatcgagggcgaagcatccgccggttcctaatgtacggagcagatgctagggcaaattgccctagcaggggaaaaaggtcgaaaaggtctctttcctgtggatagcacgtacattgggaacccaaagccgtacattgggaaccggaacccgtacattgggaacccaaagccgtacattgggaaccggtcacacatgtaagtgactgatataaaagagaaaaaaggcgatttttccgcctaaaactctttaaaacttattaaaactcttaaaacccgcctggcctgtgcataactgtctggccagcgcacagccgaagagctgcaaaaagcgcctacccttcggtcgctgcgctccctacgccccgccgcttcgcgtcggcctatcgcggccgctggccgctcaaaaatggctggcctacggccaggcaatctaccagggcgcggacaagccgcgccgtcgccactcgaccgccggcgcccacatcaaggcaccctgcctcgcgcgtttcggtgatgacggtgaaaacctctgacacatgcagctcccggagacggtcacagcttgtctgtaagcggatgccgggagcagacaagcccgtcagggcgcgtcagcgggtgttggcgggtgtcggggcgcagccatgacccagtcacgtagcgatagcggagtgtatactggcttaactatgcggcatcagagcagattgtactgagagtgcaccatatgcggtgtgaaataccgcacagatgcgtaaggagaaaataccgcatcaggcgctcttccgcttcctcgctcactgactcgctgcgctcggtcgttcggctgcggcgagcggtatcagctcactcaaaggcggtaatacggttatccacagaatcaggggataacgcaggaaagaacatgtgagcaaaaggccagcaaaaggccaggaaccgtaaaaaggccgcgttgctggcgtttttccataggctccgcccccctgacgagcatcacaaaaatcgacgctcaagtcagaggtggcgaaacccgacaggactataaagataccaggcgtttccccctggaagctccctcgtgcgctctcctgttccgaccctgccgcttaccggatacctgtccgcctttctcccttcgggaagcgtggcgctttctcatagctcacgctgtaggtatctcagttcggtgtaggtcgttcgctccaagctgggctgtgtgcacgaaccccccgttcagcccgaccgctgcgccttatccggtaactatcgtcttgagtccaacccggtaagacacgacttatcgccactggcagcagccactggtaacaggattagcagagcgaggtatgtaggcggtgctacagagttcttgaagtggtggcctaactacggctacactagaaggacagtatttggtatctgcgctctgctgaagccagttaccttcggaaaaagagttggtagctcttgatccggcaaacaaaccaccgctggtagcggtggtttttttgtttgcaagcagcagattacgcgcagaaaaaaaggatctcaagaagatcctttgatcttttctacggggtctgacgcttagtggaacgaaaactcacgttaagggattttggtcatgcatgatatatctcccaatttgtgtagggcttattatgcacgcttaaaaataataaaagcagacttgacctgatagtttggctgtgagcaattatgtgcttagtgcatctaacgcttgagttaagccgcgccgcgaagcggcgtcggcttgaacgaatttctagctagacattatttgccgactaccttggtgatctcgcctttcacgtagtggacaaattcttccaactgatctgcgcgcgaggccaagcgatcttcttcttgtccaagataagcctgtctagcttcaagtatgacgggctgatactgggccggcaggcgctccattgcccagtcggcagcgacatccttcggcgcgattttgccggttactgcgctgtaccaaatgcgggacaacgtaagcactacatttcgctcatcgccagcccagtcgggcggcgagttccatagcgttaaggtttcatttagcgcctcaaatagatcctgttcaggaaccggatcaaagagttcctccgccgctggacctaccaaggcaacgctatgttctcttgcttttgtcagcaagatagccagatcaatgtcgatcgtggctggctcgaagatacctgcaagaatgtcattgcgctgccattctccaaattgcagttcgcgcttagctggataacgccacggaatgatgtcgtcgtgcacaacaatggtgacttctacagcgcggagaatctcgctctctccaggggaagccgaagtttccaaaaggtcgttgatcaaagctcgccgcgttgtttcatcaagccttacggtcaccgtaaccagcaaatcaatatcactgtgtggcttcaggccgccatccactgcggagccgtacaaatgtacggccagcaacgtcggttcgagatggcgctcgatgacgccaactacctctgatagttgagtcgatacttcggcgatcaccgcttcccccatgatgtttaactttgttttagggcgactgccctgctgcgtaacatcgttgctgctccataacatcaaacatcgacccacggcgtaacgcgcttgctgcttggatgcccgaggcatagactgtaccccaaaaaaacagtcataacaagccatgaaaaccgccactgcgccgttaccaccgctgcgttcggtcaaggttctggaccagttgcgtgagcgcatacgctacttgcattacagcttacgaaccgaacaggcttatgtccactgggttcgtgcccgaattgatcacaggcagcaacgctctgtcatcgttacaatcaacatgctaccctccgcgagatcatccgtgtttcaaacccggcagcttagttgccgttcttccgaatagcatcggtaacatgagcaaagtctgccgccttacaacggctctcccgctgacgccgtcccggactgatgggctgcctgtatcgagtggtgattttgtgccgagctgccggtcggggagctgttggctggctggtggcaggatatattgtggtgtaaacaaattgacgcttagacaacttaataacacattgcggacgtttttaatgtactgaattaacgccgaattgaattcaagagctcaaggatcctaactataacggtcctaaggtagcgaaggcgcgccgaattcgaggggatcgagcccctgctgagcctcgacatgttgtcgcaaaattcgccctggacccgcccaacgatttgtcgtcactgtcaaggtttgacctgcacttcatttggggcccacatacaccaaaaaaatgctgcataattctcggggcagcaagtcggttacccggccgccgtgctggaccgggttgaatggtgcccgtaactttcggtagagcggacggccaatactcaacttcaaggaatctcacccatgcgcgccggcggggaaccggagttcccttcagtgagcgttattagttcgccgctcggtgtgtcgtagatactagcccctggggcacttttgaaatttgaataagatttatgtaatcagtcttttaggtttgaccggttctgccgctttttttaaaattggatttgtaataataaaacgcaattgtttgttattgtggcgctctatcatagatgtcgctataaacctattcagcacaatatattgttttcattttaatattgtacatataagtagtagggtacaatcagtaaattgaacggagaatattattcataaaaatacgatagtaacgggtgatatattcattagaatgaaccgaaaccggcggtaaggatctgagctacacatgctcaggttttttacaacgtgcacaacagaattgaaagcaaatatcatgcgatcataggcgtctcgcatatctcattaaagcagggggtgggcgaagaactccagcatgagatccccgcgctggaggatcatccagccggcgtcccggaaaacgattccgaagcccaacctttcatagaaggcggcggtggaatcgaaatctcgtgatggcaggttgggcgtcgcttggtcggtcatttcgaaccccagagtcccgctcagaagaactcgtcaagaaggcgatagaaggcgatgcgctgcgaatcgggagcggcgataccgtaaagcacgaggaagcggtcagcccattcgccgccaagctcttcagcaatatcacgggtagccaacgctatgtcctgatagcggtccgccacacccagccggccacagtcgatgaatccagaaaagcggccattttccaccatgatattcggcaagcaggcatcgccatgggtcacgacgagatcctcgccgtcgggcatgcgcgccttgagcctggcgaacagttcggctggcgcgagcccctgatgctcttcgtccagatcatcctgatcgacaagaccggcttccatccgagtacgtgctcgctcgatgcgatgtttcgcttggtggtcgaatgggcaggtagccggatcaagcgtatgcagccgccgcattgcatcagccatgatggatactttctcggcaggagcaaggtgagatgacaggagatcctgccccggcacttcgcccaatagcagccagtcccttcccgcttcagtgacaacgtcgagcacagctgcgcaaggaacgcccgtcgtggccagccacgatagccgcgctgcctcgtcctgcagttcattcagggcaccggacaggtcggtcttgacaaaaagaaccgggcgcccctgcgctgacagccggaacacggcggcatcagagcagccgattgtctgttgtgcccagtcatagccgaatagcctctccacccaagcggccggagaacctgcgtgcaatccatcttgttcaatccacatgatcaaacgttttgaggacgcgagaggattcgattcgacgacgagagcctcgcgagattggggagaaatttttcgggggtggagctgatgcgaggagaggagatgagggggctggtatttatggcggttgggtggtgggaggagtcccgtgccgtgacgtctccgtctgcttggagaatccgccacgctgaaaccaccgcggtttccgggaagacgaggcgggcgagcgagcggttgggaaatttcgagaagatgccgtttgtctccgtttggtacacgtctcgttgatttttttttagtgaattacgctttggaccacattttattatctaagggtgtgtttggttgtaagccacactttgccacagtttgccacgcctaaggttaggcaaatttgacaggtgtttggttgtagccacagttgtggcaagatttccctctaacaaattaagtcccacgtgtcaatggctcaaaaaagtgtggcaagattcccttaggcttagtaagttgtggctaacaatttgatcacctcaccttagacaaggtgtggcaacttttgttggcaagtaatggtaaagtatggctgggaaccaaacagcccctaagttttactttggactacctttaaacatatcttttcactttgaactagataaatttgctattgttgcgatttggattttttttttctcgtgcaatcaacgaccttaaacacatcagctctagtatacggccgatctcctctatatatggttcatatgtttgccgaaagggaagttagacatgacgaaaagttgttcatggtagtccaaaccacaacccggcccaatttgaaaagataggtttaagggtggtccaaattgaaacttgggtaataaaaggtggatcaaagtgcaatttacttttttttactgtaatttcttctggctggtttgttggtcgccgttaggaccgggtgacgccgtcaaccccgcgcctccgtattcgctgacgtggggtggcgcgctggcttccgccttgacccgaatttgttttccttccgttaaaaaaatggttttccttttcttaaaaaggaaatagtttgttttttaagtctgtgtattaggattattacacttgaattttggtatatgtgtaggataatttactgcatgtttataatagagttgtactatagatgaaataacccaatttttggtataattcgtgtttggttggaggtcaaaataacaggttattttgtgaagaaaaaactccgtagtatagtaccatatccatcatgaatacacatactgcctagacgagtgattaggatgaatccatgttatattcctcaaaataatataaaccacttgatcttatgatcttatccaatctgttcatataaactggagatataagatggtgcatttcccttttgatttcttttgttgacggccatgagataggttgcatccactgcatttatattttggaccaatacaatgcacctattgatacatggggacagctcaactaaccatgatgcaaaatgctggttggtgaccagttcttggcattatgataatgataggattaaaaaaaacagtgcaatgtctcggaaagaaaccatgacaaagggtacatgttgcattccagtttctaatgataaaattatgtgccagcaattcaaaaatcatgcgtgttccctacgcaccattctttgcaataaacaagtgcatgcacaatatgattgtgctaaggttcaagaacttgttgcagtggctaagcttggcgcgcctcgcgaccacctttaattaagtgaagagcaggagcttgcatgcctgcaggctctagaggatcccccctcagaagaccagagggctattgagacttttcaacaaagggtaatatcgggaaacctcctcggattccattgcccagctatctgtcacttcatcgaaaggacagtagaaaaggaaggtggctcctacaaatgccatcattgcgataaaggaaaggctatcgttcaagatgcctctaccgacagtggtcccaaagatggacccccacccacgaggaacatcgtggaaaaagaagacgttccaaccacgtcttcaaagcaagtggattgatgtgatatctccactgacgtaagggatgacgcacaatcccactatccttcgcaagacccttcctctatataaggaagttcatttcatttggagaggacaggcttcttgagatccttcaacaattaccaacaacaacaaacaacaaacaacattacaattactatttacaattacagtcgactctagaggatccatggtgagcaagggcgaggagctgttcaccggggtggtgcccatcctggtcgagctggacggcgacgtaaacggccacaagttcagcgtgtccggcgagggcgagggcgatgccacctacggcaagctgaccctgaagttcatctgcaccaccggcaagctgcccgtgccctggcccaccctcgtgaccaccttcacctacggcgtgcagtgcttcagccgctaccccgaccacatgaagcagcacgacttcttcaagtccgccatgcccgaaggctacgtccaggagcgcaccatcttcttcaaggacgacggcaactacaagacccgcgccgaggtgaagttcgagggcgacaccctggtgaaccgcatcgagctgaagggcatcgacttcaaggaggacggcaacatcctggggcacaagctggagtacaactacaacagccacaacgtctatatcatggccgacaagcagaagaacggcatcaaggtgaacttcaagatccgccacaacatcgaggacggcagcgtgcagctcgccgaccactaccagcagaacacccccatcggcgacggccccgtgctgctgcccgacaaccactacctgagcacccagtccgccctgagcaaagaccccaacgagaagcgcgatcacatggtcctgctggagttcgtgaccgccgccgggatcactcacggcatggacgagctgtacaagtaaagcggccgcccggctgcagatcgttcaaacatttggcaataaagtttcttaagattgaatcctgttgccggtcttgcgatgattatcatataatttctgttgaattacgttaagcatgtaataattaacatgtaatgcatgacgttatttatgagatgggtttttatgattagagtcccgcaattatacatttaatacgcgatagaaaacaaaatatagcgcgcaaactaggataaattatcgcgcgcggtgtcatctatgttactagatccgatgataagctgtcaaacatgagaattcctttcgtcgacccacgtgttgctgaggtatttaaataatccgaaaagtttctgcaccgttttcaccccctaactaacaatatagggaacgtgtgctaaatataaaatgagaccttatatatgtagcgctgataactagaactatgcaagaaaaactcatccacctactttagtggcaatcgggctaaataaaaaagagtcgctacactagtttcgttttccttagtaattaagtgggaaaatgaaatcattattgcttagaatatacgttcacatctctgtcatgaagttaaattattcgaggtagccataattgtcatcaaactcttcttgaataaaaaaatctttctagctgaactcaatgggtaaagagagagattttttttaaaaaaatagaatgaagatattctgaacgtattggcaaagatttaaacatataattatataattttatagtttgtgcattcgtcatatcgcacatcattaaggacatgtcttactccatcccaatttttatttagtaattaaagacaattgacttatttttattatttatcttttttcgattagatgcaaggtacttacgcacacactttgtgctcatgtgcatgtgtgagtgcacctcctcaatacacgttcaactagcaacacatctctaatatcactcgcctatttaatacatttaggtagcaatatctgaattcaagcactccaccatcaccagaccacttttaataatatctaaaatacaaaaaataattttacagaatagcatgaaaagtatgaaacgaactatttaggtttttcacatacaaaaaaaaaaagaattttgctcgtgcgcgagcgccaatctcccatattgggcacacaggcaacaacagagtggctgcccacagaacaacccacaaaaaacgatgatctaacggaggacagcaagtccgcaacaaccttttaacagcaggctttgcggccaggagagaggaggagaggcaaagaaaaccaagcatcctccttctcccatctataaattcctccccccttttcccctctctatataggaggcatccaagccaagaagagggagagcaccaaggacacgcgactagcagaagccgagcgaccgccttctcgatccatatcttccggtcgagttcttggtcgatctcttccctcctccacctcctcctcacagggtatgtgcctcccttcggttgttcttggatttattgttctaggttgtgtagtacgggcgttgatgttaggaaaggggatctgtatctgtgatgattcctgttcttggatttgggatagaggggttcttgatgttgcatgttatcggttcggtttgattagtagtatggttttcaatcgtctggagagctctatggaaatgaaatggtttagggatcggaatcttgcgattttgtgagtaccttttgtttgaggtaaaatcagagcaccggtgattttgcttggtgtaataaagtacggttgtttggtcctcgattctggtagtgatgcttctcgatttgacgaagctatcctttgtttattccctattgaacaaaaataatccaactttgaagacggtcccgttgatgagattgaatgattgattcttaagcctgtccaaaatttcgcagctggcttgtttagatacagtagtccccatcacgaaattcatggaaacagttataatcctcaggaacaggggattccctgttcttccgatttgctttagtcccagaattttttttcccaaatatcttaaaaagtcactttctggttcagttcaatgaattgattgctacaaataatgcttttatagcgttatcctagctgtagttcagttaataggtaatacccctatagtttagtcaggagaagaacttatccgatttctgatctccatttttaattatatgaaatgaactgtagcataagcagtattcatttggattattttttttattagctctcaccccttcattattctgagctgaaagtctggcatgaactgtcctcaattttgttttcaaattcacatcgattatctatgcattatcctcttgtatctacctgtagaagtttctttttggttattccttgactgcttgattacagaaagaaatttatgaagctgtaatcgggatagttatactgcttgttcttatgattcatttcctttgtgcagttcttggtgtagcttgccactttcaccagcaaagttcatttaaatcaactagggatatcacaagtttgtacaaaaaagcaggcttaaacaatggcgaccatcaatggcttaacctcaccacacccctttctctctctacaaaaatccaactcaaagccctttctctctctgtcaaaacccatgaagtctcaattcttattcaaaggtcttaaacagcagaatcagcagttgagagattgggctgtagtgggttcggtatcaaacgaagccgacgagattcgggtccaaagttctgacgttatggaccagcaaaatggggttgtaattgggttggaaagagaaccgaaattagggggcggagatatgggtattgtaaatcaggtggtgggtgggtttggaaatgaagggaggttgtcgtttgaaggtggtggtgggttttcttcggcaagtggtgttggtggatcagagagtaaagaggaggatgtggagaaacttattgatagaactataaatgcaactattgtgttagctgctggatcttttgctattactaaattgctcactattgatcatgattactggcatggatggaccttatttgagatattgagatatgcacctcagcacaactgggttgcatacgaggaagcgcttaaaagaaatccagttttggctaaaatggttatcagtggagtggtttactctgttggggattggattgcacagtgctatgaagggaagcctctttttgaaatcgatcgtgcacgtatgttgagatcaggcttagttggattcacgctacatggatccctctctcattattattatcagttctgtgaggcactgtttccattcgaagattggtgggtggttcctgtcaaggttgcctttgatcaaactgtttggtcagcaatttggaacagcatctacttcacagttttgggaattttacgtcttgaatcccctcttgctattttcagtgaattgaaggctacgttcttgccaatgttgacggctggttggaagctgtggccatttgctcatctaattacatatggtgtaattccggttgaacaaaggcttctttgggttgactgtgtagaactcgtttgggtgacaatactctcaacttattcaaatgagaaatcagaatctagagtctctgaggtgatcgtagaagcagaggcgcaacctccctcagtaagcccaccacaggagtaaatgaatcgaagagcaatgacacaaccaaaattacccagctttcttgtacaaagtggtgatatcacaagcccgggcggtcttctagggataacagggtaattatatccctctagatcacaagcccgggcggtcttctacgatgattgagtaataatgtgtcacgcatcaccatgggtggcagtgtcagtgtgagcaatgacctgaatgaacaattgaaatgaaaagaaaaaaagtactccatctgttccaaattaaaattggttttaaccttttaataggtttatacaataattgatatatgttttctgtatatgtctaatttgttatcatccgggcggtcttctagggataacagggtaattatatccctctagacaacacacaacaaataagagaaaaaacaaataatattaatttgagaatgaacaaaaggaccatatcattcattaactcttctccatccacttccatttcacagttcgatagcgaaaaccgaataaaaaacacagtaaattacaagcacaacaaatggtacaagaaaaacagttttcccaatgccataatactcgactcgagttcctgcaggtaccaaaagcttagcttgagcttggatcagattgtcgtttcccgccttcagtttaaactatcagtgttt

SEQ ID NO: 137 - DNA, 52 bp, Artificial sequence
  sense primer
ggggacaagtttgtacaaaaaagcaggcttaaacaatggcgaccatcaatgg

SEQ ID NO: 138 - DNA, 50 bp, Artificial sequence
  reverse primer
ggggaccactttgtacaagaaagctgggtaattttggttgtgtcattgct

SEQ ID NO: 139 - DNA, 1668 bp, Arabidopsis thaliana
atggctaatccacttctctattctccgatcaacccacaattcttccaaccacttcttcccggtttcaccaaccacctggacattcctgtggcgttcttcttgaagtacttagtgggaactaacgtaggaaaaacggctgagctcagatcagatgcatcggagatgacatggaaagtgaagatagacggccggagactctctaatggttgggaagatttcacaatcgcacatgatctccgagttggtgacattgttgttttcagacaagaaggagagttagtgttccatgtcacagctttaggaccaagttgctgtgagattcaatacggagaagatacccttgaagaggataaaattgagaaactttgtggtacggagaatgtttcaagtaagaaaaagagtctaaagagagaagctgagtctgcaccagacaattcactagattcttgttttgtggccactgtcacgggttcgaatctaaagcgcgatacattgtatattccgaaagagtttgcattgtcaaatggtctgatgaacaaatatcagattgtgttaatgaatgaagaaggagaatcatggaagatagacttgagacgcgaggcatataattacggccggttttacatgagaagaggctggagaagtttctgtattgctaatgggaagaaacctggagacgtttttgcattcaaattggtcaaaaatgaagaaacacctatgatacagttgttccctatgaccattgaagatttagacaaacttcagagtcttccaagacacaagattcgaaaaacagaagcagctccttcttcaccggacctttcttcttttgtagccactgtcacggcttcaaatctaagccgagatagactgtatcttccgaagacgttcattatgtcaaatggtttgttgaagaaatttcagatgtgtctaatgaatgaagagggagaatcatggacgatagatgtgaaacatgaggcacatacaggccggtttttaacgataagaggttggagaagattctgtgtggctaatgggaagaaaccaggagacttgctcaaattcaaattagtccataacgaagaaacacctgtgctccagttgttacccttgaacagtgaagatctacacaaacttaatcctagcaatgacacaaggcatggacagagtttaaaagttaccaaaaaagagtttcttggcatggaagccacagaaaatgagtttcttggggaagaagtttactgtaatgactcctttaaagctagcgagaaagatactcttccttttgctgaacctatcaatgaagatataaggcaaggacaatgttcacaaactattaaacaagaatatgtttccacagaagagaaaaactcaacaagccaaaaccgatttgtgaccttaacacttacacattcaagtaaacttaatcttccgtttgaattcatgaagcggaatggaatcaaaaaggcggggaagataacgatggttgatagatacgatgcaaaatggcgtacttcactactgatggacaagatcggaacaatgagtttaggaagaggttcaaaaggtttctgcgaggttaatggtgttgagatgaatgagtcgtttatcttggagttgatttgggaagacacagttcctcttcttaagttttgttccaaagtttga

SEQ ID NO: 140 - protein, 555 aa, Arabidopsis thaliana
MANPLLYSPINPQFFQPLLPGFTNHLDIPVAFFLKYLVGTNVGKTAELRSDASEMTWKVKIDGRRLSNGWEDFTIAHDLRVGDIVVFRQEGELVFHVTALGPSCCEIQYGEDTLEEDKIEKLCGTENVSSKKKSLKREAESAPDNSLDSCFVATVTGSNLKRDTLYIPKEFALSNGLMNKYQIVLMNEEGESWKIDLRREAYNYGRFYMRRGWRSFCIANGKKPGDVFAFKLVKNEETPMIQLFPMTIEDLDKLQSLPRHKIRKTEAAPSSPDLSSFVATVTASNLSRDRLYLPKTFIMSNGLLKKFQMCLMNEEGESWTIDVKHEAHTGRFLTIRGWRRFCVANGKKPGDLLKFKLVHNEETPVLQLLPLNSEDLHKLNPSNDTRHGQSLKVTKKEFLGMEATENEFLGEEVYCNDSFKASEKDTLPFAEPINEDIRQGQCSQTIKQEYVSTEEKNSTSQNRFVTLTLTHSSKLNLPFEFMKRNGIKKAGKITMVDRYDAKWRTSLLMDKIGTMSLGRGSKGFCEVNGVEMNESFILELIWEDTVPLLKFCSKV

SEQ ID NO: 141 - DNA, 1587 bp, Arabidopsis thaliana
atggcgcatcaacatttcttcaagcctcttcttcctggcttccacgcctccttgacaattcctgtagccttcttcttgaagtatatagaaggaagatatgagcagaagacggcgaagctgagatcagacgcgtcaaagagaacttgggaagtgaagatagatggccagagactcaccgacggttggaaagagtttgctgtctcacatgatcttcgaatcggtgacattgttgttttcagacaagagagtgacttggctttccatgtaacactgttgggacctagttgttgtgggattcaatatggttcgtgttcagtcgaaaagaacaacctcggtgacgagaaaaagaaagtgaaggagaatccaaatggagaagcagagtcttcttcacgagatccctcttgttttgtggctaatgttgcgccttcgagtctacgttatgacttgatgagatttccaaggggttttgtgagggataatggtgtagtcggatctggagagattgttctgatgaatgaaaagggcagatcatggaattttaacttgagacaaaagccatcaaacggaacagtttatgttagaggagggtgggtgagtttttgtgatgccaatgggcttaaagctggagataactacactttcaaactgatcaaaagagcaggaactcttgttctacgtttgttacccaatgagccaaaagaggaagctaatgaagtgtctcttcccgaagaaccggaaagcgatgcagagcgcaaccttgaaaagattcaaaggaaggagaaagtgaagaagaatgtaacaagagaggcagagtcttcttcacaagatccctcttgttttgtggctaatgtctccccttcgagtctacgctatgacacactgtatcttccaaagcgttttatgagggaaaatggtgtagacaaaagatgtggagagatgattctgattaatgaaaagggaaaatcatggactttagatttgaaagtaaagaaatcatccggaacttctctcatcaaacgaggatggagaagtttctgtagtgccaatggactaagagctggaagtatcataactctcaaactgataaagaaaagagcaactcttgttctacgtttgatccccaacgagccagaagaagctaatgaagtagtctctctttcgacagagcaagaaagcgatgaagagagtatccacgacgagaaaatctcaagaagaaagtctttactatccgaaaaccgatttgtgacattaactctaacaccttatacaatccaaagttctctactgaatgagaatcttttgtgtgaatctatgtttcagcgtcttccggttcctttcacgaggatgaatggtatcaatgaagaaactaaaatgactctgttggataaacatggtgtgaagtggttaacgactctgcggttcgaggacgacaaaagaaaaagactacgaatggtaggaggatggcaaggattcatccaagctaacgatgtgaaggcaaacgaatccatcatgttggaactgatttgggaagaagaaacaagttgcgtccttaagttctgctccaaggtgaagctagaaatcaaatga

SEQ ID NO: 142 - protein, 528 aa, Arabidopsis thaliana
MAHQHFFKPLLPGFHASLTIPVAFFLKYIEGRYEQKTAKLRSDASKRTWEVKIDGQRLTDGWKEFAVSHDLRIGDIVVFRQESDLAFHVTLLGPSCCGIQYGSCSVEKNNLGDEKKKVKENPNGEAESSSRDPSCFVANVAPSSLRYDLMRFPRGFVRDNGVVGSGEIVLMNEKGRSWNFNLRQKPSNGTVYVRGGWVSFCDANGLKAGDNYTFKLIKRAGTLVLRLLPNEPKEEANEVSLPEEPESDAERNLEKIQRKEKVKKNVTREAESSSQDPSCFVANVSPSSLRYDTLYLPKRFMRENGVDKRCGEMILINEKGKSWTLDLKVKKSSGTSLIKRGWRSFCSANGLRAGSIITLKLIKKRATLVLRLIPNEPEEANEVVSLSTEQESDEESIHDEKISRRKSLLSENRFVTLTLTPYTIQSSLLNENLLCESMFQRLPVPFTRMNGINEETKMTLLDKHGVKWLTTLRFEDDKRKRLRMVGGWQGFIQANDVKANESIMLELIWEEETSCVLKFCSKVKLEIK

SEQ ID NO: 143 - DNA, 4389 bp, Arabidopsis thaliana
atggcgaattcaaggatttatccgcaattcttccacacacttgttcctagcttccacactcacttgatgattcctgaagacttcttctcagagtatatcgaaggaagaagcgtcgcagagctgaaattggacttttcagacaaatcttgggaagtgaagttgtctgatcggagaatcactgacggctgggaagagtttgtggtggctaatgattttcgtatcggcgatgttgtcgcttttagatatgttggaaatttggtgttccatgtttctaatttaggacctaattactatgagattgaacacaatgatgagcttcccaaagagaagaaagcgaagacgaacagtgaagaagcagatgcagtttcttcttcttcatcagcagacaagtcatgttttatggccattatcacagctttagatctaacgacagatacactgtatcttccactacattttacaagcgcaaatggtcttacacgaaaaaaccgggagattattttaacagatggaggggaaagatcaagggtattggatctgaggttcgacgaatcatctggtactttttatatcagccggggttggagaaatttctgtgatgaaaatggacaaaaagcaggaggtttctttctgtttaaactagtgggaaaaggtgaaacgctggtgctcagtttctgtcctacagaatctatcaatggggaagagaacataacaagggaggacagtaaagacgagtgcagctcgttggactcattgatgaatatagtagaaaaaaagaagtatattccgaaaccaagaggttcaccatattcatcatattcaccaagtcataaacaattcgtaacatttacgcttccaccggattatgctagaattggaaaattgagtctttcggcgcctttcgttagggaaaatggcatcaacaagcctggggagatatgtcttttggataaacatggtagaaagtggttgacaagtcttctgctggacagtaaaggaacaatgtctttgggaaagggttggaaagagtttgttaaagcaaacagcttagagacgggcttcacactcaagttgatatgggaagaaacaactcctgtgcttagtttgtgtagtccagaatctaacagtgacagagagcaggaagagatttcaaaagctatcgagaaacattctcttttcatagatcctagcaacagggacaaaatcagcaacaatgacaaagaggagaacatgtcatgggagagaaagaaggatcatctgaaaagtagagattcaactctatcaagccaaaaacaatttgtaacaataacaattacaccttccagtgatagattggtaagtttatcaaatgactcttgtttagtggttgttagtttattgtactttgatatgcgtctcccaaaggtattcacgagggagaatggcatcaacaagccggggaggattactctgttgggaaaagacggtataaagcagcagacgaatttgttattcgacaaagcaaatggtgccatgtctttgggacacggctggaaagattttgttaaagataatggcttaaagacaggtgactccttcacgctaaagttgatttgggaagaccaaactcctgttcttagcttgtgtcctgcagactgtagcattgacagagaagcaggaggagggcgatctgaaacaaaccagaaaaagtctcttccaatagaacctagcacatgtaaaaaaatcaggaaagacgtgaacatcaaagatgacaacagcaaagagaaaaatgacaaagaagagagcaaatcagtggatggagagaggaaatatctgagagggacatatttaactccatcaagccaaaaacactttgtgacattaacaattacaccttcctctataaaaaaagatagacttattctttccccacaatttgcaaggaagaacaatattgacaagcctggaatgatatatctgctggatacagatggtacaaagtggctgataagccttcaacgagataagaaaggaacaatgagtttgggaaaaggttggaaagaatttgctgaagcaaatgactttaagttaggcgaatcctttacgatggagttagtatgggaagacacaactcctatgctcagtttgttacgtaccgagtttaggagttcaaaagctaacgagaaagagtcaatttcctcagaacataaaaccagagaatcatccccaacaatcaaaaaccgaatcgtgactccagcactcacacctgaagatgttaaagcctgtaaattgattcttccaagtcaattcatgaagaagatcaggacagtggataaagagaggaatcatctaaaagggagagatttaaatccatcgtgccaaaaacaatttattctttcagcgcaatttgcaagggagaacaatattaaccagcctggaacgatatatctattggatacagatggtaggaagtggctgacaacggttaaacgggacaagaaaggaacaatgagtttgggaaagggttggaaagagtttgctgatacaaaagacttaaagtcaggcgactcctttacgatggagttaatatgggaagacacaaatcctgtgctcagtttgttacgtacaaagtttagcagttctaaatctaacaaggaagagtccatttttttagaaccaaaaagtagagattcatcctccccaacaatcgtaaacagattcgtgacattagcacttacaccagaagatgttacagcctgtaaactgattcttccaagtcagttcatgaaggctaatggcatcaacaacaaacttgggaagataactcttttgggtgaaaacggagtcgaatggccgggatatatgttgtcgctagatggaactctcgctttaggaaatggttgggaaggcttttgtgaggctaatggcgtgaagttaggacagacttttactttggagtttgttaatgaacaagatacaacaacaactccgagaatacctgtagccttcttcttgaagaatatagaaggaagatatgagcagaagacggcggagctgagatcagatgcgtcaaagataacttgggaagtgaagatagatggacagagactcactgacggttggaaagagtttgctctctcacatgatcttcgaatcggtgacattgttgttttcagacaagagagagatatgtctttccacgttacaatgttgggacctagttgttgtgagatccaatatggttcgtgttcagacgaggagagaaacctcgagaagaagaagaatccaaatggagaagcaaagtcttcttcactagatccttcttgtttttcggctaatgtggcgccttcgagtctacgttatgacttaatgctttttccaatgggttttgtgagggaaaatggtgtagtcggatctggaaagattgttctgatgaatgaaaagggcagatcatggaattttaacttgagacaaaagccatcatgcggaacagtttatgttagaggagggtgggtgagtttttgtgatgccaatggacttcaagctggagatatctacactttcaaactgatcaaaagaggaggaactcttgttctacgtttgttacccaaaggggcagagtcttgttcactagatccctcttgttttgtggctaatgttgcgccttcgactctacgctatgacacactgtatcttccaaagcgttttatgagggaaaatggtgtagacaaaagacgtggagagatgattctgatgaatgaaaagggcaaatcatggactttagatttgaaactaaagaaatcatgcggaacttccctcatcagacgaggatggagaagtttctgtagtgccaatggactaagagctggaagtatcattactttcaaactgattaagaaaagtggaactcttgttctatgtttgctctccaacgagccagaagaagaagtgtgctcagaagctaatgaagtagagtctctttcgacagatcaagaaagccatgaagagagtagccacaacgagaaaatctcaagaagaaaggaaaagaagggtagaatgatatggaaagcttcgtcttcaccatccgaaaaccgatttgtgacattaaatcttacaccttataacatcctacgttctgcactgcgtcttccgatacccttcacgaggatgaatggtatcaatgaagaaactaaaatgactctgttggataaacatggtatgaagtggttaacgactctgcggttggtggactacaaaagaaaaagactgggaatggtaggaggctggaaaggattcatccaagctaacggtgtgaaggcaaacgaatccatcatgttggaactgatttgggaagaagaaacaagttgcgtccttaagttctgctccaaggtgaagctagcaatcaaatga

SEQ ID NO: 144 - protein, 1462 aa, Arabidopsis thaliana
MANSRIYPQFFHTLVPSFHTHLMIPEDFFSEYIEGRSVAELKLDFSDKSWEVKLSDRRITDGWEEFVVANDFRIGDVVAFRYVGNLVFHVSNLGPNYYEIEHNDELPKEKKAKTNSEEADAVSSSSSADKSCFMAIITALDLTTDTLYLPLHFTSANGLTRKNREIILTDGGERSRVLDLRFDESSGTFYISRGWRNFCDENGQKAGGFFLFKLVGKGETLVLSFCPTESINGEENITREDSKDECSSLDSLMNIVEKKKYIPKPRGSPYSSYSPSHKQFVTFTLPPDYARIGKLSLSAPFVRENGINKPGEICLLDKHGRKWLTSLLLDSKGTMSLGKGWKEFVKANSLETGFTLKLIWEETTPVLSLCSPESNSDREQEEISKAIEKHSLFIDPSNRDKISNNDKEENMSWERKKDHLKSRDSTLSSQKQFVTITITPSSDRLVSLSNDSCLVVVSLLYFDMRLPKVFTRENGINKPGRITLLGKDGIKQQTNLLFDKANGAMSLGHGWKDFVKDNGLKTGDSFTLKLIWEDQTPVLSLCPADCSIDREAGGGRSETNQKKSLPIEPSTCKKIRKDVNIKDDNSKEKNDKEESKSVDGERKYLRGTYLTPSSQKHFVTLTITPSSIKKDRLILSPQFARKNNIDKPGMIYLLDTDGTKWLISLQRDKKGTMSLGKGWKEFAEANDFKLGESFTMELVWEDTTPMLSLLRTEFRSSKANEKESISSEHKTRESSPTIKNRIVTPALTPEDVKACKLILPSQFMKKIRTVDKERNHLKGRDLNPSCQKQFILSAQFARENNINQPGTIYLLDTDGRKWLTTVKRDKKGTMSLGKGWKEFADTKDLKSGDSFTMELIWEDTNPVLSLLRTKFSSSKSNKEESIFLEPKSRDSSSPTIVNRFVTLALTPEDVTACKLILPSQFMKANGINNKLGKITLLGENGVEWPGYMLSLDGTLALGNGWEGFCEANGVKLGQTFTLEFVNEQDTTTTPRIPVAFFLKNIEGRYEQKTAELRSDASKITWEVKIDGQRLTDGWKEFALSHDLRIGDIVVFRQERDMSFHVTMLGPSCCEIQYGSCSDEERNLEKKKNPNGEAKSSSLDPSCFSANVAPSSLRYDLMLFPMGFVRENGVVGSGKIVLMNEKGRSWNFNLRQKPSCGTVYVRGGWVSFCDANGLQAGDIYTFKLIKRGGTLVLRLLPKGAESCSLDPSCFVANVAPSTLRYDTLYLPKRFMRENGVDKRRGEMILMNEKGKSWTLDLKLKKSCGTSLIRRGWRSFCSANGLRAGSIITFKLIKKSGTLVLCLLSNEPEEEVCSEANEVESLSTDQESHEESSHNEKISRRKEKKGRMIWKASSSPSENRFVTLNLTPYNILRSALRLPIPFTRMNGINEETKMTLLDKHGMKWLTTLRLVDYKRKRLGMVGGWKGFIQANGVKANESIMLELIWEEETSCVLKFCSKVKLAIK

SEQ ID NO: 145 - DNA, 1473 bp, Arabidopsis thaliana
atggcgaatcaacatttcttcaagcctcttcttcctggcttccacacccacttgagaatacctgtagccttcttcttgaagaatatagaaggaagatatgagcagaagacggcggagctgagatcagatgcgtcaaagataacttgggaagtgaagatagatggacagagactcactgacggttggaaagagtttgctctctcacatgatcttcgaatcggtgacattgttgttttcagacaagagagagatatgtctttccacgttacaatgttgggacctagttgttgtgagatccaatatggttcgtgttcagacgaggagagaaacctcgagaagaagaagaatccaaatggagaagcaaagtcttcttcactagatccttcttgtttttcggctaatgtggcgccttcgagtctacgttatgacttaatgctttttccaatgggttttgtgagggaaaatggtgtagtcggatctggaaagattgttctgatgaatgaaaagggcagatcatggaattttaacttgagacaaaagccatcatgcggaacagtttatgttagaggagggtgggtgagtttttgtgatgccaatggacttcaagctggagatatctacactttcaaactgatcaaaagaggaggaactcttgttctacgtttgttacccaaaggggcagagtcttgttcactagatccctcttgttttgtggctaatgttgcgccttcgactctacgctatgacacactgtatcttccaaagcgttttatgagggaaaatggtgtagacaaaagacgtggagagatgattctgatgaatgaaaagggcaaatcatggactttagatttgaaactaaagaaatcatgcggaacttccctcatcagacgaggatggagaagtttctgtagtgccaatggactaagagctggaagtatcattactttcaaactgattaagaaaagtggaactcttgttctatgtttgctctccaacgagccagaagaagaagtgtgctcagaagctaatgaagtagagtctctttcgacagatcaagaaagccatgaagagagtagccacaacgagaaaatctcaagaagaaaggaaaagaagggtagaatgatatggaaagcttcgtcttcaccatccgaaaaccgatttgtgacattaaatcttacaccttataacatcctacgttctgcactgcgtcttccgatacccttcacgaggatgaatggtatcaatgaagaaactaaaatgactctgttggataaacatggtatgaagtggttaacgactctgcggttggtggactacaaaagaaaaagactgggaatggtaggaggctggaaaggattcatccaagctaacggtgtgaaggcaaacgaatccatcatgttggaactgatttgggaagaagaaacaagttgcgtccttaagttctgctccaaggtgaagctagcaatcaaatga

SEQ ID NO: 146 - protein, 490 aa, Arabidopsis thaliana
MANQHFFKPLLPGFHTHLRIPVAFFLKNIEGRYEQKTAELRSDASKITWEVKIDGQRLTDGWKEFALSHDLRIGDIVVFRQERDMSFHVTMLGPSCCEIQYGSCSDEERNLEKKKNPNGEAKSSSLDPSCFSANVAPSSLRYDLMLFPMGFVRENGVVGSGKIVLMNEKGRSWNFNLRQKPSCGTVYVRGGWVSFCDANGLQAGDIYTFKLIKRGGTLVLRLLPKGAESCSLDPSCFVANVAPSTLRYDTLYLPKRFMRENGVDKRRGEMILMNEKGKSWTLDLKLKKSCGTSLIRRGWRSFCSANGLRAGSIITFKLIKKSGTLVLCLLSNEPEEEVCSEANEVESLSTDQESHEESSHNEKISRRKEKKGRMIWKASSSPSENRFVTLNLTPYNILRSALRLPIPFTRMNGINEETKMTLLDKHGMKWLTTLRLVDYKRKRLGMVGGWKGFIQANGVKANESIMLELIWEEETSCVLKFCSKVKLAIK

SEQ ID NO: 147 - DNA, 2763 bp, Arabidopsis thaliana
atggcggatcaatctcttctacactctccgatcaacccacatttctttcagcctattcttacagaatctcgcactcacctcaacattcctgtagctttcttctcgaagcatgttgaaggaagaaacaaccaaaacaagactgtgacgctaagatcagacgcgtcggataaaacttggttagtgaagatggacggtctaaaactaaccgacggatgggaagattttgcctttgcacatgatcttcgaactggtgacatcgtcgttttcagacttgaaggagaaatggtgtttcatgtcacagctttaggaccaagctgttgcgagattcaatatcatacatcatctcacaatatcaatgatgatgatcgtaatgatcagatcaacattgcttcaagaaacagttcaagagtgaagaagaatccacgaaagaaagtagagtcttctttagaccattctcgttttgtggcaaaagtctcagcttggtgcctaagcaatgatagactgtatataccactaagtttcgccaggttaaacggtctgaacaaaatcaacagtaagaaaatctatcttcagaacgaagaaggaagatcatggaagttagttttgagacatgacaaatcaggcatgcaaacttttgtccaatccggttggagaagattctgctctgaaaatgggattaggcaaggtcaatatacattcaaacttgtccgaaaatcagcaccacctgtcatccgtttgtgccgcgcaaaagctaaaccaaaacaaagatcagttgcagaatattcatcagaccattcttgttttgagggatctgtcactccttcaagcctaagaaatgatctactgtatcttccaaggagctttgtgaactcaaatcgtctggacaaaagatgcagtgagatagttttaaagaatgaacagggagtaaaatggcctttagttttgaaacgtttcaaatcagtcacttatctcccaaaaggctggactagtttctgtcaagtaaacaggatcaaagcaggagattcattcaagtttaaactggttggaacctggaaaaaacctgttctttctttgtgtccgacacaatccaacaatcacaaaactccattagagtgttcagaaggtaacaaatccgaagaaagtgaagaggattgcttggaggtaaagaaaaagaagtattggtcgagatgcagagcttctgtagaaaacatggatgatgatcagaccaacattggaaacagttcaagaaagaagagagtgagtaagaatccaagagagaaagtagagtcttcatcagaccattctagttttgtgggatctgtcaatccttcaagcctatacaaagatcaactgtatcttccaaggaattttgtgagctcaaattttctggacaaaagatgcagtgagatagttttaaagaatgaacggggagaaaaaaggactttagttttgaaacacttcaaaaaagaccttacttttctcaaaaaaggctggactagtttctgtcaagtaaataggatcaaagctggagattccttcaagtttaaactggttggaacatggaacaaacctgttctttctttgtgccctacagaaaccaactatcacaaaactccattagcgtgttcagagggtaacaaatccgaagaaagtgaagaggagggtactgaagacaagaatacctcacaagattgcttggaggtgaagaaaaggaagtattggtcaacatgcagagcttctgcagagaacatagatgatgatcagaccaatattggaaacagttcaaaagagaagagagtgaagaaaaatccagtaaagaaagcagagtcttcatcagaccattctagttttgtggctaatgtcacagcttcaagcctaaactatgatcgactgtatttaccactaagtttcgtgagttcaaacggtctagataaaatgaacggtaaggagatcgttcttcttaatgaagaaggactatcatggaagtttaatttgaagtacaaccaagcaggcaagcatacttatgtcagacctggttggtcaagattctgtgatgcaaatgggatgagccaaggtcaacaatttacattcaaactggtccaaaaacatggaccacctgtcatgtatttgagcctcagtgaacatagaccaaagtcagaatcttcatcgcaccgttcctattttgtaggatctgtcactgcttcaagcataaagaaagataaactgtatttatggaagagttttgtgagctctaatggtctggacaaaggatgcaagaagataattttaaagaataaatggggaagagaatggaaattagtcttgaaacactacaaatcaaactgctttactattatcaaacgaggctggaccagtttctgccaaggcaacggtttgaaagctggagattccttcaagttcaaactggttggaaccggggaaaagcctgttctttctttgtgccctgcagaatccagccatgaaaaaattccattagagtgtccagaaggtatagatgatgtcaattcactctcctcaaatcctagcagtggagatgacagtagtagatccgaagaaagcgaagaggagaatatggaagacaagaacatctcacaggattgcttggaaaccaagaaaaggaagtattgctcttcatcgtcatatagtcaaaaccgatttgtgacattaactcttacacggtccgcttttcaaacctataaactggtaagcttcttcaacaactatgcctcaaggttgtcttag

SEQ ID NO: 148 - protein, 920 aa, Arabidopsis thaliana
MADQSLLHSPINPHFFQPILTESRTHLNIPVAFFSKHVEGRNNQNKTVTLRSDASDKTWLVKMDGLKLTDGWEDFAFAHDLRTGDIVVFRLEGEMVFHVTALGPSCCEIQYHTSSHNINDDDRNDQINIASRNSSRVKKNPRKKVESSLDHSRFVAKVSAWCLSNDRLYIPLSFARLNGLNKINSKKIYLQNEEGRSWKLVLRHDKSGMQTFVQSGWRRFCSENGIRQGQYTFKLVRKSAPPVIRLCRAKAKPKQRSVAEYSSDHSCFEGSVTPSSLRNDLLYLPRSFVNSNRLDKRCSEIVLKNEQGVKWPLVLKRFKSVTYLPKGWTSFCQVNRIKAGDSFKFKLVGTWKKPVLSLCPTQSNNHKTPLECSEGNKSEESEEDCLEVKKKKYWSRCRASVENMDDDQTNIGNSSRKKRVSKNPREKVESSSDHSSFVGSVNPSSLYKDQLYLPRNFVSSNFLDKRCSEIVLKNERGEKRTLVLKHFKKDLTFLKKGWTSFCQVNRIKAGDSFKFKLVGTWNKPVLSLCPTETNYHKTPLACSEGNKSEESEEEGTEDKNTSQDCLEVKKRKYWSTCRASAENIDDDQTNIGNSSKEKRVKKNPVKKAESSSDHSSFVANVTASSLNYDRLYLPLSFVSSNGLDKMNGKEIVLLNEEGLSWKFNLKYNQAGKHTYVRPGWSRFCDANGMSQGQQFTFKLVQKHGPPVMYLSLSEHRPKSESSSHRSYFVGSVTASSIKKDKLYLWKSFVSSNGLDKGCKKIILKNKWGREWKLVLKHYKSNCFTIIKRGWTSFCQGNGLKAGDSFKFKLVGTGEKPVLSLCPAESSHEKIPLECPEGIDDVNSLSSNPSSGDDSSRSEESEEENMEDKNISQDCLETKKRKYCSSSSYSQNRFVTLTLTRSAFQTYKLVSFFNNYASRLS

SEQ ID NO: 149 - DNA, 585 bp, Brassica napus
atggctgatgatgcagttcttcaatctccaacaaacccacatttcttccagcctcttcttcctggctatcattcacacatgaacgttcctgtagccttcttctcaaagcatgtccaaggaagaaacggagacaagactgcaagattgagatcagatgcttcggatacgacttgggaagtggtaataaacggccggagactcaccggaggatggaaagaattcgtcaaagctcatgatctccgtgttggagatgttcttgttttcagacacgagggagaactggtgtttcatgtcactgcactgggatccagttgctgtgaggttgagtacgcaacccttgatgacggtgatgataataaagaaactgttttagcttcagatatcaaaccaatgaagaagagagtgaagaagaacccaaggaaaaaagattcttgttcttgttttctagcaaatgtcacagtctcaagcttgcatgaggataaactgtatgttccagttagttttgtgaggtcaaacggtttgagcaatacgtactgtaagattgttcttcttaacgaaaagggaaggtcatggaagttaagttag

SEQ ID NO: 150 - protein, 194 aa, Brassica napus
MADDAVLQSPTNPHFFQPLLPGYHSHMNVPVAFFSKHVQGRNGDKTARLRSDASDTTWEVVINGRRLTGGWKEFVKAHDLRVGDVLVFRHEGELVFHVTALGSSCCEVEYATLDDGDDNKETVLASDIKPMKKRVKKNPRKKDSCSCFLANVTVSSLHEDKLYVPVSFVRSNGLSNTYCKIVLLNEKGRSWKLS

SEQ ID NO: 151 - DNA, 699 bp, Brassica napus
atggcgaatcaacatttcttcaagcctcttcttcccggcttccacagccacttgaaaattcctgtagccttcttctccaagcatatagaaggaagaaatgagcataaaaacacggcgaagctgagatcagacacgtcggagataacctggaaagtgaagatagaagacggcctgagactcactgaaggttggaaagagttcgctcttgcacatgatctacgagttggtgacattgtcgttttcagacaagagaacgacatggctttccacgtgacactgttcggacccagttgctgtgagatacaatatggatcgtgtttggacgacaagaacaagcttgtgacgattcaaagcagcaagaagaaaatgaagaatacaaaaagagaagcagagtctagtacactagagccatcttgttatgtggctaacgtcacgccttcaagcctgcgatatgacatgctgaatattccaaagagttttgcaagggctaatggtatagagtcaagaagtggagagatcattgttctgatgaatgaaaagggtacttcgtggactttaattttgaaacgaaagaattcatgtggaactatgtatatcacacgaggatggagacgcttctgtagagccaatggacttaaagctggatgtttcttcactttcaaactgatacaaagaggagggacctctttttctacataa

SEQ ID NO: 152 - protein, 232 aa, Brassica napus
MANQHFFKPLLPGFHSHLKIPVAFFSKHIEGRNEHKNTAKLRSDTSEITWKVKIEDGLRLTEGWKEFALAHDLRVGDIVVFRQENDMAFHVTLFGPSCCEIQYGSCLDDKNKLVTIQSSKKKMKNTKREAESSTLEPSCYVANVTPSSLRYDMLNIPKSFARANGIESRSGEIIVLMNEKGTSWTLILKRKNSCGTMYITRGWRRFCRANGLKAGCFFTFKLIQRGGTSFST

SEQ ID NO: 153 - DNA, 768 bp, Solanum lycopersicum
atgcagtcttcttcgccagaacttccgattagcagacgtttcttcaaggttatggtgcctggttttcactctaaacttacaattccaccagctttttttccgaagctaaaaggggataatttagaaaaggggacaataataaagggcaaagatatatggaatgttgaaattaatcgatccgagaagggcactatctcgtttgataagggttgggaggaatttgtgcaaaatcatgacctaagagttggagattttgctgtgtttgagcacttgggtgatatgcgtttcagtgttacacttcttgattcaactggctgtgataagaagttgttggagaagagtgaagtagtaccttcccaggagaaaaagaaaaaggtgaaatctgctcagcccggaatagagaaaaggaaagttgagggagatcaacctcactaccaatgcatgaaaggaagttctgagttcacggcaagaataaaagaatataacgtgagaaaacgttctccttatatgcatatacccacagagttttgtcagtcaaatgcactctttcagaatacaaccatgacgttaacaggcccgtcgggtaaatcatgtcctgtgagtctgagaatttgcaatggtgggaagactctatatgcttgtattaccagaggctggcatgatttcttttcaagcaacaagctaaaagtaggcgatgtttgcctcttccaacttgatcgctcaaaaagcgactcaaattccattgccatcgatgttcgtgttttgtag

SEQ ID NO: 154 - protein, 255 aa, Solanum lycopersicum
MQSSSPELPISRRFFKVMVPGFHSKLTIPPAFFPKLKGDNLEKGTIIKGKDIWNVEINRSEKGTISFDKGWEEFVQNHDLRVGDFAVFEHLGDMRFSVTLLDSTGCDKKLLEKSEVVPSQEKKKKVKSAQPGIEKRKVEGDQPHYQCMKGSSEFTARIKEYNVRKRSPYMHIPTEFCQSNALFQNTTMTLTGPSGKSCPVSLRICNGGKTLYACITRGWHDFFSSNKLKVGDVCLFQLDRSKSDSNSIAIDVRVL

SEQ ID NO: 155 - DNA, 1389 bp, Arabidopsis thaliana
atggcgaatgcatcacagttatctccgacaaacaaacacttcttcaagcctcttctccccggattccagagaaacctcaatattcctgtgaagttcttctccgagcacatcgagggaaaacacgagggcgagactgtaaagttgagagcagatgcgtcgaagagaacatgggaagtgaagatggatggcaacagactcaccgaaggttggaaagagttcgtggaggcacatgatcttcgtatccgcgacttcgttgtctttagacacgaaggagacatggtgttccatgtcactgctttgggacctagttgctgtgagatccaatacccacagtctatcagccatgaagaaggcgaagagagtggtgaagttgaaatatccgagagagaagttgaggagaatttgcaaaaagaatatgatcagtcttcagcagatctgaattgttttagccaatccgtaacgcactcaaacatatcaaatgatcttgtgactctgcccagggatttcgcaaaacgaaacggtttagacaaaggaatgcatgagatagtattgatgaatgaagaaggaaagtcatgggaatcagaagtaaggagtagaatgtctggtcaggtttttattgttggaggttggaaaagtctctgcagcgaaaataaattaaaaggtggagattcttgcacattcaaactgctgcaaaatgcgaaaacgcccgtgtttcagctctgtagccgcatcggagaaagtcggtttgtgaagttaactcctacactaaacagccttgagattggcaaacagcatctaccggtaagtttcacgaaagggaatggactcatacatccgggggagataattctggtggacaaagacagagttgaatggtcgatgaagcttcaggttgataatagaggagggatgcatatatttggtggtaatgactggaaaagtttctgtgccgcaaatgaagtaggcgcaggggagtcactaactttggagttgattcgaggaggcttaagtcctttattcaagttcttctccaagatagagcaaccctcattcgaagcagaggataggagacacaagagagctcgagtccataatgggagccaggaaacagataagggagaaccttctcgagcaactaaaatgggaccggagcttgagaaaagggagaagacagctgaaaaaggagaaccgtctcgagcatctaacaaatccagtggtaaacaaggaaacttacagaaaacgcaagcttgctctgtcacagatcacgtggctaaggtgaaagagagcgttgtagatactttaactagtatcagacggttccaagcagagcttgaaacaatggaacagaaattagaagattcattgcaggaaatcaacaagttaagttag

SEQ ID NO: 156 - protein, 462 aa, Arabidopsis thaliana
MANASQLSPTNKHFFKPLLPGFQRNLNIPVKFFSEHIEGKHEGETVKLRADASKRTWEVKMDGNRLTEGWKEFVEAHDLRIRDFVVFRHEGDMVFHVTALGPSCCEIQYPQSISHEEGEESGEVEISEREVEENLQKEYDQSSADLNCFSQSVTHSNISNDLVTLPRDFAKRNGLDKGMHEIVLMNEEGKSWESEVRSRMSGQVFIVGGWKSLCSENKLKGGDSCTFKLLQNAKTPVFQLCSRIGESRFVKLTPTLNSLEIGKQHLPVSFTKGNGLIHPGEIILVDKDRVEWSMKLQVDNRGGMHIFGGNDWKSFCAANEVGAGESLTLELIRGGLSPLFKFFSKIEQPSFEAEDRRHKRARVHNGSQETDKGEPSRATKMGPELEKREKTAEKGEPSRASNKSSGKQGNLQKTQACSVTDHVAKVKESVVDTLTSIRRFQAELETMEQKLEDSLQEINKLS

SEQ ID NO: 157 - DNA, 1059 bp, Arabidopsis thaliana
atgaagaatccgacactctttgctccaaaaagtccacactttttccagcctattcttcccggtttcaagagccacatcaaaatccctgtgaagttcttctccaagcatatagagggaaaacacgagggaaatactgtctatttgagatcatatccttcgaggagaacgtggaaagtgaagatggagggccataaactcactgaaggttggaaagagttcgtggaggcacatgatcttcgagtcggtgacttcgtcgtcttcaaacacaaaggagacatgttgttccatgtgactgctataggacccagttgctgtgaagtccaatacgcaccatctcgtagccacgacagaaacgaagagagtgatgaaattggggaatcttcaagaaatgagaaaattattgaggagaatgtgaaaacagaacctgatcagttttcaccagatctaacatgttttagccaatctgtgaccgcttcaaacctaacgagagatttagtgggtattcccagagatttcgcaaagcgatatggtttgaacataggtaggcatgagatagttttgatggacgaagaaggaaatacatgggaatcagaagttaaaagttacaagtctggtcgggtttttatagctggaggttggacaagtctctgcactgcaaataaattagaagttggagattcttgtacatttaaactgctccgcaacccgaaaattcccgtgtttcggctctgcagccgcccaaaggctggagcagaggctcggccacacaagagatctcgagtccaaagtagcagcggggggagtagacagaagcatgacgtgaggcagaagttagatgaagaaggagggccatctcgttgcactcggtcatctaacaaggctactggtgatcaagaaaagttgcagcaaacgcaatcttgctttatctttgatcatgtggctaaggtgaaacagagcgttgaagatactttaaatagtattagacggttccgggctaaactcgagacaaaggaacataatttggaagctttgttacaggaaacgaaaactaagttatga

SEQ ID NO: 158 - protein, 352 aa, Arabidopsis thaliana
MKNPTLFAPKSPHFFQPILPGFKSHIKIPVKFFSKHIEGKHEGNTVYLRSYPSRRTWKVKMEGHKLTEGWKEFVEAHDLRVGDFVVFKHKGDMLFHVTAIGPSCCEVQYAPSRSHDRNEESDEIGESSRNEKIIEENVKTEPDQFSPDLTCFSQSVTASNLTRDLVGIPRDFAKRYGLNIGRHEIVLMDEEGNTWESEVKSYKSGRVFIAGGWTSLCTANKLEVGDSCTFKLLRNPKIPVFRLCSRPKAGAEARPHKRSRVQSSSGGSRQKHDVRQKLDEEGGPSRCTRSSNKATGDQEKLQQTQSCFIFDHVAKVKQSVEDTLNSIRRFRAKLETKEHNLEALLQETKTKL

SEQ ID NO: 159 - DNA, 756 bp, Arabidopsis thaliana
atggcggatccagttcttcaatctccgaaaaactcacatttcttccagccacttcttcccggcttcgactcttaccttaacattcctgtgaagtttttctcaaaacgcatacaaggaagaaacgaaggaaggacagtggagctaagaaccgacgcgtctgaaaaaacttggcaagttaagatccaaggtcggagactaacagtgggctggaaagagttcgccagcgcgcatgatttccgagttggggatattatcgttttcagacacgaaggatctttggtatttcatgtcactgcattgggacccagttgctgtgagattcaatatgtaccgtcttgcaataatcaggagaacattagtaacttgtcgatgaagcagagcataaaaacagaactagagtcttcactcgacgaagacaaagttaacatgggaaagtttccaagaaaaaaacatgtgaagaagaggattcctgaagcagaagccaagtctttttcatcagacaagtcctgtttcgttgcacatgtaacagattctaacttacgagaggatacactgtttcttccaaggaagtttgataggtccgatggtctgattaaaggaagtaacaagattgttctgatgaatgaagaagcaaggacatggacgcttattctgaagtttaggaattcaagtagaacgttttacatgaggggtggctggacaagtttctccatgagcatgggcttaaacctggagattccgtcacgtttaaactag

SEQ ID NO: 160 - protein, 251 aa, Arabidopsis thaliana
MADPVLQSPKNSHFFQPLLPGFDSYLNIPVKFFSKRIQGRNEGRTVELRTDASEKTWQVKIQGRRLTVGWKEFASAHDFRVGDIIVFRHEGSLVFHVTALGPSCCEIQYVPSCNNQENISNLSMKQSIKTELESSLDEDKVNMGKFPRKKHVKKRIPEAEAKSFSSDKSCFVAHVTDSNLREDTLFLPRKFDRSDGLIKGSNKIVLMNEEARTWTLILKFRNSSRTFYMRGGWTSFSMSMGLNLEIPSRLN

SEQ ID NO: 161 - DNA, 1482 bp, Arabidopsis thaliana
atgaacaacccgacactcttttctcctaaaagtccacactttttccagcctcttcttcccggtttcaagagccacatcaacattcctgtgaagttcttctccaagtatatcaaggggaaacacgaaggaaagaccgtaaaattgagatcagattcttcgaagagaacatggaaagtgaagattgagggccatacgctcaccgacggttggaaagagtttgtggaggcacatgatcttcgaatcagtgacttcgtcatcttcaaacacaaaggagacatgttcttcgatgtcactgctttaggatccagttgctgggaatcttcaagaaaggagaaagaaattgaggagaatatagaaacagaacccgatcagttttcatcagatctaacatgttttagccaatctgtgaccacttcaaacctaatgagagattcagtgggtgtgcccagagatttcgcaaagcgatatggtttcaacataggaaggcatgagatagttttgatgaacgaagaaggaaagccatgggaatcagaagttataagttataagtctggtaaagttattgtagctggaggttggaaaagtctctgcactgaaagtaaattagaagttggagattcttgtacatttaaactgcttcacaacgccaaaatgcccgtgtttcggctctgcagcaagctcccaaaggctggagcagaggctcggccactcaagagagctcgagtccaaagatggagccaagagagtagatcgaagcatgacgtgagggagaagatagctgaagaaggagaaccttctcgtcgcaatcgcacatctaacaagtctactggtgatcaaggaaagttgcagcaaacgcaatcttgctttatctttgatcatgtggctaagtctcttccaaggaattttgttaggtccgatggtctgattaaaggaagtaacaagattgttctaatgaatgaaggagcaaggacatggacgcttattctgaagtttagggattcacgtagatcgttttacagtaggggtggctggagaagtttctgccgtgagaatgggcttaaacctggagattctgtcacgtttaaactggagagtagcaacacaaaaacgcctctactccttttctccattgcagaatcaaagagtgcttccacaaaagataggacccgatttctgacactaactgtcacaccatccagtatccgcagttccagactttatctttcgaagaagtttattagtgttaacaagatggaaagggcaggagggaagaagataactctattggacaagaatggagaagagtggccagtgaccttactgatggataaaagatatacaaggatggttttgggttcagggttgagagaattctgcaatgctattggcgttaaggcatatgaatctgtggtgttggagttggtttgggaagagacaacaactcttcctatgttcaaattctgctccaagatcaagacttga

SEQ ID NO: 162 - protein, 493 aa, Arabidopsis thaliana
MNNPTLFSPKSPHFFQPLLPGFKSHINIPVKFFSKYIKGKHEGKTVKLRSDSSKRTWKVKIEGHTLTDGWKEFVEAHDLRISDFVIFKHKGDMFFDVTALGSSCWESSRKEKEIEENIETEPDQFSSDLTCFSQSVTTSNLMRDSVGVPRDFAKRYGFNIGRHEIVLMNEEGKPWESEVISYKSGKVIVAGGWKSLCTESKLEVGDSCTFKLLHNAKMPVFRLCSKLPKAGAEARPLKRARVQRWSQESRSKHDVREKIAEEGEPSRRNRTSNKSTGDQGKLQQTQSCFIFDHVAKSLPRNFVRSDGLIKGSNKIVLMNEGARTWTLILKFRDSRRSFYSRGGWRSFCRENGLKPGDSVTFKLESSNTKTPLLLFSIAESKSASTKDRTRFLTLTVTPSSIRSSRLYLSKKFISVNKMERAGGKKITLLDKNGEEWPVTLLMDKRYTRMVLGSGLREFCNAIGVKAYESVVLELVWEETTTLPMFKFCSKIKT

SEQ ID NO: 163 - DNA, 1386 bp, Arabidopsis thaliana
atggcgaatgcatcacccttgtctccgactaaccaacacttcttccagcctcttcttcccggattccagagcaacctcaaaattcctgtgaactacttctctgagcacatcgagggaaaacacgaaggcaagactgtaacgttgagaacagatgcgtcggagagaacatgggaagtaaagatggagggtcatagactcacggaaggttggaaagagttcgttgaggcacatgatcttcgaatcggtgactttgttgtctttagacatgaaggagacatggtgttccatgtcactgctttgggacctagttgctgtgagatccaatacccacagtctagcagacatgaagaaggcgaagagagtggtgaaaatgaaatatccgagaaagaaggtgaagagaatgtgcaaaaagaatctgataagtcttcatcagatctgaattgttttagccaatccgtgacgcattcaaacatatcaagagatgcagtgagtgtgccgagagatttcgtgaagcgaagtggttttagtaaaggaaggcatgagatagttttgatgaacgaagaaggaaagtcatgggaatcagaagtaaagagttatatgtctggtgcggtttatttagttggaggttggacaactttctgcaccgaaaataaattagatgttggagattcttgcacattcaaactgttgcaaaaggcgaaaacgcccgtgtttcagctctgcagccgcacaaagcatctaccgttaagtttcacgaaagtgaatggactcatcaatccagggaagataattctggtggacaaagacagagctgagtggtcgatgatgcttaaggttgatagtagaggagctgtgtatattattggtggtaatgactggaaaagtttctgtgccgcaaatgaagtaggcgcaggggagtcactagctttggagttgatccaaggaggtgttttgctaaatcaaataacgacttgttttcagatggagcaaccctcattcaaagcagaggatgggagacacaagagagctcgagtccaaaataggagccaggaaacagataagggagcagaaacttctagagcatctacaatgggaccgaagcttgagataactgaaaaaggagaaccctctcgagcatctacaatgagaccgaaagttgagataagggagaaaatagctgaaacgggagaaccctctcgagcatctaacaaatctagtggtattgaaggaaacttgcagcacacgaaaccttgctcagtcaaaacagatcagttggccaaggtgaaagagagcgttgtagatacgttaactagtatcgggcggttccaagcagagctcgagacaatgaaacgtaaactagaagattcattgcaggaactcaactag

SEQ ID NO: 164 - protein, 461 aa, Arabidopsis thaliana
MANASPLSPTNQHFFQPLLPGFQSNLKIPVNYFSEHIEGKHEGKTVTLRTDASERTWEVKMEGHRLTEGWKEFVEAHDLRIGDFVVFRHEGDMVFHVTALGPSCCEIQYPQSSRHEEGEESGENEISEKEGEENVQKESDKSSSDLNCFSQSVTHSNISRDAVSVPRDFVKRSGFSKGRHEIVLMNEEGKSWESEVKSYMSGAVYLVGGWTTFCTENKLDVGDSCTFKLLQKAKTPVFQLCSRTKHLPLSFTKVNGLINPGKIILVDKDRAEWSMMLKVDSRGAVYIIGGNDWKSFCAANEVGAGESLALELIQGGVLLNQITTCFQMEQPSFKAEDGRHKRARVQNRSQETDKGAETSRASTMGPKLEITEKGEPSRASTMRPKVEIREKIAETGEPSRASNKSSGIEGNLQHTKPCSVKTDQLAKVKESVVDTLTSIGRFQAELETMKRKLEDSLQELN

SEQ ID NO: 165 - protein, 5 aa, Artificial sequence
  motif 1-3
PVAFF

SEQ ID NO: 166 - protein, 11 aa, Artificial sequence
  motif 2-3
HDLRVGDIVVF

SEQ ID NO: 167 - DNA, 2194 bp, Oryza sativa; identical to SEQ ID NO: 46

SEQ ID NO: 168 - DNA, 56 bp, Artificial sequence
  primer: prm15379
ggggacaagtttgtacaaaaaagcaggcttaaacaatggctaatccacttctctat

SEQ ID NO: 169 - DNA, 50 bp, Artificial sequence
  primer: prm15380
ggggaccactttgtacaagaaagctgggtcgatgatcctagacattctta

SEQ ID NO: 170 - DNA, 597 bp, Oryza sativa
atggactacggcgacggggaggtgcggctggtgaggaggaaggggaagaagaggctcgctccgcctccgcctccgcctccggcggcggaggggggcgagagggacaggttggacgagctccggcgggactaccgcgatgtgctcaaggataatgagatgaagaggaggaagctagagagcataaacaagcgaaagctcgtcctgctttctgaagtcaagttcttacaaaagaagttaaattctttcaagaagaatgattcgcagcaagtacggctgaagaagaaagctccgcgagtcccatctcatgtgggaatcaatgatgcttcagctttttatggggcgagtactgaagtgccatctaccagtaaaagaacagatttagatttaaatcaagattctgcaatgaatgatgagctttctgatttcccggggcaccataaccatttggaacttaaaaaggctgaacaggctggagtagatgaagatattatgactgccgatgtcaacctatcagcttgtagggataccggaaactctccggcaagcgatgataagaggagtgtttcatggcaagaccgtgtagcgttgaaggtctag

SEQ ID NO: 171 - protein, 198 aa, Oryza sativa
MDYGDGEVRLVRRKGKKRLAPPPPPPPAAEGGERDRLDELRRDYRDVLKDNEMKRRKLESINKRKLVLLSEVKFLQKKLNSFKKNDSQQVRLKKKAPRVPSHVGINDASAFYGASTEVPSTSKRTDLDLNQDSAMNDELSDFPGHHNHLELKKAEQAGVDEDIMTADVNLSACRDTGNSPASDDKRSVSWQDRVALKV

SEQ ID NO: 172 - DNA, 714 bp, Arabidopis lyrata
atgaaggagactaatatcgtctcctctgcttcttgtggcgatcccatgatcagattcacccttatgcagcaggttctggagttggaaaaggaattagaagtaaagagaaagaaattggagatgattaaacaaaaaagattgaccctcaagtcagaagttaggttcttgagacgtagatacgagcacttgaagcaagaccaaactcttgaaacatctccaaagatgttgagattgtcagaatctgggggtttagagatcccaaggaaaccaagtggcgaaaacaagaagcaccctggtgtgagcgcacctgtgccatgttttgatttgaaacagaagaatacaatttgcaatgagaaggaagcattggctaagaatgcaagttgtgacttggaaaagaagcgaagaaggagcagaggaaacgatgttttgacaattcccgtttcacttcctgaccttaatggagagggaaacacttctgtcaccgacaaagtcccgggctttgacctaaaccagatctcgagagaagaagaggagccggaagtgaatggtgaacatatggtcgtggaatcaatgaagaatgcaatgcgtgataacagaatcagtgatctacatggtgaaaggaagttaccgatttgcggagatgtggagaaagagttaaatagagcagtgaagaggaaggttacatggcaagatccagtggctttaagtgtttag

SEQ ID NO: 173 - protein, 237 aa, Arabidopis lyrata
MKETNIVSSASCGDPMIRFTLMQQVLELEKELEVKRKKLEMIKQKRLTLKSEVRFLRRRYEHLKQDQTLETSPKMLRLSESGGLEIPRKPSGENKKHPGVSAPVPCFDLKQKNTICNEKEALAKNASCDLEKKRRRSRGNDVLTIPVSLPDLNGEGNTSVTDKVPGFDLNQISREEEEPEVNGEHMVVESMKNAMRDNRISDLHGERKLPICGDVEKELNRAVKRKVTWQDPVALSV

SEQ ID NO: 174 - DNA, 714 bp, Arabidpsis thaliana
atgaagaagactaatttcgtttcctctgcttccggtggcgatcccatgatcagattaacctttgtgcaggttctggagttggaaaaggaattagagataaagagaaagagattggagatgattaaacaaaagagattgaccctcaagtcagaagttaggttcttgagacgtagatacgagcacttgaagcaagatcaaactcttgaaacctctccagagatgttgagattgtcagaatccgggggtttagaggtcccaaggaaaccaagtggcgaaagaaagaagcagtctggtgtgagagcatctgtaccatgttttgatttgaaactgaagaatacaatttgcaatgagaaggaagcattggctaataatgttgcaagttgtgacttggataagaagcgaaaaaggagcagaggaagcgatgttttgacattccccgtttcacttcctgaccttaacggagagggaaacacttctggcactgacaaagtccctggctttgacctaaaccagatctcgagagaagaagaggagccggaagtgaatggtgaacatatggtcgcggaagcaatgaagaatgcaatgcttgataacaggatcagtgatctacatgttgaaagaaagttacccatttgcggagatgtggagaaagagttaaatagagcagtgaagaggaaggttacatggcaagatccagtggctttaagtgtttag

SEQ ID NO: 175 - protein, 237 aa, Arabidpsis thaliana
MKKTNFVSSASGGDPMIRLTFVQVLELEKELEIKRKRLEMIKQKRLTLKSEVRFLRRRYEHLKQDQTLETSPEMLRLSESGGLEVPRKPSGERKKQSGVRASVPCFDLKLKNTICNEKEALANNVASCDLDKKRKRSRGSDVLTFPVSLPDLNGEGNTSGTDKVPGFDLNQISREEEEPEVNGEHMVAEAMKNAMLDNRISDLHVERKLPICGDVEKELNRAVKRKVTWQDPVALSV

SEQ ID NO: 176 - DNA, 615 bp, Brassica napus
atgaaggagattacagacttggtcgatcccaggatcatgttcaagcatcaatcccttttgcaggattatcacgagttgagaaaggaaacagagtttaagatgaggaaactggagatgatgacgcaaaaacgattggcccttgatgcacaagttaggttcttgagacgcagatacaaacacttgaagcaagaccaaactcttgaaacatctcccgacacgctgagattgtcggaatctggaggagatgtgaaggtaacaacaagtggcaaaagaaagaagcactctggtccatggtttgatttgaagcgcaaggatacagtttgcaatgacaataatgcaaggagcagaggaaacgaggttttaactccacttcctgatcttaacgacaacactctggtggtcagcagcaaagtctcgggctttgacctaaacctggtctcgagagaagaagaagaggagccggaagggaatggtgaagcgacaaagaaggtaatgcttggtaatggaatcgattgcgagttgaagttgcctatttgcagagacgtggggaaagagattagtagagcagtgaagaggaaggtgtcatggcaagatccagtggctctaagggtttga

SEQ ID NO: 177 - protein, 204 aa, Brassica napus
MKEITDLVDPRIMFKHQSLLQDYHELRKETEFKMRKLEMMTQKRLALDAQVRFLRRRYKHLKQDQTLETSPDTLRLSESGGDVKVTTSGKRKKHSGPWFDLKRKDTVCNDNNARSRGNEVLTPLPDLNDNTLVVSSKVSGFDLNLVSREEEEEPEGNGEATKKVMLGNGIDCELKLPICRDVGKEISRAVKRKVSWQDPVALRV

SEQ ID NO: 178 - DNA, 882 bp, Capsicum annuum
atgtctaagaagatgaaaaggggtgctttagaattgtcaccttatgtgatgtatgaagatactaaggctagattgaaacatcagacactatttcaggactttcaagaactccataaggaaactaatgacatgagggacaaattggaggatgcgaaaatgaggaaacaaagattacttgctgaagtttgtttcttgcgccgaagacacaagtacctattgcagatgaagtcatcaagtcatccggaacagcaagaacgggcagcgctgccaaactcagagttttactgtaaagacgggatgaaagatcgatttctcagcaaaaaggaggcaaagcaatacaaactgccccctcttcctgtaccgaaacagaaagcgaggattcaagctgcaaacgaagcttctcggcagaaaacccctcccgatattcttgtgcataacactttcctgcatagtacagtttcaagtttgaagcatacatcaagagtacatagtggcaaggaagtgctactccgaaaagcagctccaccgtttgatttgaatcagaatgacaggtcatttgctgggaacagttctatttcgaggagcaccacacccgtctttgatttgaatcaggaaactggtcatggcgggaaagatgttgtattgcctagtcgagctccagtcatcgatttgaatgaaatctcagtaggggaagaggagccgccacaagcaaattttgaaccattgaactttgaggagccaaagagaggattaattcaaaacacgaacgatgatcagcacaaagacttaaagttatcgctatgcagaaatgtgggagaaggaacttcacgtgttgagaagcgcaagatatcgtggcaagaccctgtcgctttgagggtttga

SEQ ID NO: 179 - protein, 293 aa, Capsicum annuum
MSKKMKRGALELSPYVMYEDTKARLKHQTLFQDFQELHKETNDMRDKLEDAKMRKQRLLAEVCFLRRRHKYLLQMKSSSHPEQQERAALPNSEFYCKDGMKDRFLSKKEAKQYKLPPLPVPKQKARIQAANEASRQKTPPDILVHNTFLHSTVSSLKHTSRVHSGKEVLLRKAAPPFDLNQNDRSFAGNSSISRSTTPVFDLNQETGHGGKDVVLPSRAPVIDLNEISVGEEEPPQANFEPLNFEEPKRGLIQNTNDDQHKDLKLSLCRNVGEGTSRVEKRKISWQDPVALRV

SEQ ID NO: 180 - DNA, 666 bp, Cichorium intybus
atgagtaagaagatgaaaggggttgctttcgattcatcgcctcatgtgtcttatgaggacgctcgagcaagatttaagcatcaaacccttctccaagattatctggagttagaacaggaaacagaggctgcaagaaacaaattggaggccatgaagcaaaagaaacaaactttagaagctgaagttagattcttgaggcgaagacacaaatttcttttgaaaaccaaatctgcaactccacaacaagtgaaatcgcataatttagaaacaacccaattcagaaaaagcaagaaagagaatgttcacccgaaaaaggcgccaactttacgcaatttgcccccaattcataacctaaatcaaaggggaagagtgtatacagagaagaaaaacagtaatccgagtagaccgcctcctggggataaaaatgtaaatttgcacagtgtcaacttgtccccggtgactgaatttaatcggaaagaaagcgggtttggtggtaaagaagctcgggttcctatatttgacttgaaccagatatctatggaagaagaagaagaagaacagaatgatttaaagctatcgatgtgtagaaatgttggggatggttcaacaaatagagcaggaaaaaggaagattacgtggcaagatcctgtagctttaagagtatga

SEQ ID NO: 181 - protein, 221 aa, Cichorium intybus
MSKKMKGVAFDSSPHVSYEDARARFKHQTLLQDYLELEQETEAARNKLEAMKQKKQTLEAEVRFLRRRHKFLLKTKSATPQQVKSHNLETTQFRKSKKENVHPKKAPTLRNLPPIHNLNQRGRVYTEKKNSNPSRPPPGDKNVNLHSVNLSPVTEFNRKESGFGGKEARVPIFDLNQISMEEEEEEQNDLKLSMCRNVGDGSTNRAGKRKITWQDPVALRV

SEQ ID NO: 182 - DNA, 696 bp, Centaurea maculosa
atggcgaccaaaccttctaacagagttatccttgaacagctcagaagtggggtcgcccacttcgaacttgtctcctctccggtgacttccatttgtaccaatgcgatacaatctcaatctcaatctcttttcaacaaccaaaatgcacatcgattctttgccctaattggaccaacaatgcaaagttcagcagcagcagcagcattgagcaaagtggagagttttagggtgcataaagttactggtgatggacgctgtatgtttcgtgctctggttaaaggaatggctattaacaagagtgttacccttagcccccgggaagaaagagaaaatgcagatgaattacggatggcgataaaagaggtgttatgtgacaatgagaaagagagacatcagtatgaagaagcgttaattgcaattactgttgaagagcctttaaaacgttactgtcaacgcattggacggccagatttctggggaggagagtcggaactactggtactatccaagctatgtcgccaaccaattgttgtgtacatacctgagcatgagcatacgaacagtggctatggatccggtttcataccgattgcagagtatggagcagactttggcaagggttcaaaaaaagcaaaagcgaagaaagcggtgaggcttttgtacagtggaagaaatcattatgatctcctagtgtaa

SEQ ID NO: 183 - protein, 231 aa, Centaurea maculosa
MATKPSNRVILEQLRSGVAHFELVSSPVTSICTNAIQSQSQSLFNNQNAHRFFALIGPTMQSSAAAAALSKVESFRVHKVTGDGRCMFRALVKGMAINKSVTLSPREERENADELRMAIKEVLCDNEKERHQYEEALIAITVEEPLKRYCQRIGRPDFWGGESELLVLSKLCRQPIVVYIPEHEHTNSGYGSGFIPIAEYGADFGKGSKKAKAKKAVRLLYSGRNHYDLLV

SEQ ID NO: 184 - DNA, 729 bp, Centaurea maculosa
atgagtaaaaaggttaaagggaatggatttggttcatatcctcatgaggatgataatggtaggccaagattcaagcatcaaacccttgtccaaaattaccttgatttgcaaaaggaaactgaggctgcaagaaacaaattagaggccatgaagctcaagaagctcactttagaagctcaagttcgattcttgagacgaaggcacaaattcctcgtgaagaacaagtcatgtattcaacaagagcacaccatcgtaaaaccgcagtttctagaatgtagaaaattttcaaacgaggtctactcgagaaatgaagtagctttgcaaaacatgaaccgtaatgtaaaaacgtacgcccagaagaataacaaaaacgttcttctgggcataccgtctcatatgttacatggtgtgatggatgattctcttcgaagagcgactcaagcatactacccaaaccaaatggcggttaggaccaacccgtcggatgtgagtaaagaaactcccgttaaaactcgacctcctacgtttgatttgaaccaaatatcgagagaagaagaagaagaattgcaagagaggtatgagccgaaggatttagttagaagtgtgatagacgaaaaagtcaatgacctgacgttattgacttgtggtaacgtcggccgggatgcgtcaacgagtcaagctagaaagaggaagatctcgtggcaagatcccgttgcgctacgtgtatga

SEQ ID NO: 185 - protein, 242 aa, Centaurea maculosa
MSKKVKGNGFGSYPHEDDNGRPRFKHQTLVQNYLDLQKETEAARNKLEAMKLKKLTLEAQVRFLRRRHKFLVKNKSCIQQEHTIVKPQFLECRKFSNEVYSRNEVALQNMNRNVKTYAQKNNKNVLLGIPSHMLHGVMDDSLRRATQAYYPNQMAVRTNPSDVSKETPVKTRPPTFDLNQISREEEEELQERYEPKDLVRSVIDEKVNDLTLLTCGNVGRDASTSQARKRKISWQDPVALRV

SEQ ID NO: 186 - DNA, 699 bp, Carthamus tinctorius
atgagtaaaatgaaaggggtagcctatgattcatcttctagggcaagatttaagcatcaaacccttcttcaagattacctagagttgcaacaggaaacagaggctgcaagaaacaaattggaggccatgaagcaaaagaaacaaactttagaagctgaagttagattcttgaggagaaggcacaaatttctactgaaaaccaaatcttcaactcctcaacaactgaaatcacagaattttgaaacaacccaattcaagaaaaacaagaaagagaaggttcaccctaaaaagtctgcaactttgcccaatttgccccctattcacaacctcaaccaaaggggaagagtgtatacagagaagaaaaacatggttcctagtagaccaattcctgtatttgactttgatcaaagggtaaatttgcatggtgtcaatctaaaccaaagagttatgggaaacaacttgtctctagtgaatgaattcaatcagaaagaagctgcggttcaatctcgtgctcctatattcgacttgaaccagatatcaatggaagaagaagatgtgcaagagggatttgaggatcagaggaaagaacaacatagtgatttgaagttatcgatgtgtagaaacgttggggatggttcaacgagtcgatcagggaagaggaagatctcgtggcaagatccggtggcattgagagtatga

SEQ ID NO: 187 - protein, 232 aa, Carthamus tinctorius
MSKMKGVAYDSSSRARFKHQTLLQDYLELQQETEAARNKLEAMKQKKQTLEAEVRFLRRRHKFLLKTKSSTPQQLKSQNFETTQFKKNKKEKVHPKKSATLPNLPPIHNLNQRGRVYTEKKNMVPSRPIPVFDFDQRVNLHGVNLNQRVMGNNLSLVNEFNQKEAAVQSRAPIFDLNQISMEEEDVQEGFEDQRKEQHSDLKLSMCRNVGDGSTSRSGKRKISWQDPVALRV

SEQ ID NO: 188 - DNA, 735 bp, Euphorbia esula
atgatgaagaggttgaaaggtgttgctatgccatttgaggcttctccttcttcatatgcagctgtttatgaggatcctaggatccggatgaggcatcagagtcttatgcatgactttgaggatttgtacaaggaaacagaagcacagagagataaaatagagataatgaagaagaaaaaaatgaccttgcttgctgaagtcagatttctgaagcaacgatacaattatttgaagcaaaatcaatctcaaaaaaagcctgtttccgagaaaaaacctgtacagcgatcaaaattagtaaacagaaatagaacaatgagaaaagaaaaggaacacagtgggaaaaatgcagctgctcaaattgatttaaacaagaagaaaaaggtttatagcgagaaagaatctacactgcaaatgcaaataagtaatcccgggactattccagatttgaatcagaaggaaagggtttatagtggaaaagaagccggtgttagaaatagcactcctattttcgacttgaatcaaatttcgatggaggaagaagaattacaggcgaatgatgagggaatgaggatagaggaagggaagatgatatcatgtgtaatgagagggggaagtgatgaacagatacacggggatatgaaattatcaggggcgtgtaggagtattggaaatggatcaagtagagctgggaagaggaagatttcatggcaagatcaagtggctttgagggtttaa

SEQ ID NO: 189 - protein, 244 aa, Euphorbia esula
MMKRLKGVAMPFEASPSSYAAVYEDPRIRMRHQSLMHDFEDLYKETEAQRDKIEIMKKKKMTLLAEVRFLKQRYNYLKQNQSQKKPVSEKKPVQRSKLVNRNRTMRKEKEHSGKNAAAQIDLNKKKKVYSEKESTLQMQISNPGTIPDLNQKERVYSGKEAGVRNSTPIFDLNQISMEEEELQANDEGMRIEEGKMISCVMRGGSDEQIHGDMKLSGACRSIGNGSSRAGKRKISWQDQVALRV

SEQ ID NO: 190 - DNA, 687 bp, Fragaria vesca
atggcgcataagctttcaaacgaggctgttctggagcagctcaagaatggatttgctcagttcgagctcgtctcctccccacttctctcgatttccgcgtccatttctcagccaaacgccacgccgttcaccggagaccacagtcaccgcttcttcgccagaatcggaccgccactaggcagagggtcttcggccatgaggaaagtcgaacgctactccgttcagagagttaccggcgatggacgctgtctatttcgtgccctggtaaaaggaatggcagcaaataaagggtctcctcttagcccaagggaagagagagacaatgcagatgagctacggatggctgttaaagaggttatttgcgagaatgaggaagaacgtccccagtatgaagcagctttagtggcaattactgttgatgaacccttaaaacgttactgccagcgaatccaaagacctgatttctggggtggagaatcagagctactggtgctctcaaaattgtgtagacagccaatcatcgtctatattccagagcatgagcacacaaatggtggaaggggttctggtttcattcccattgcagaatacggaagagagttcagtaaaggttcgagaaacagaaagcccaggaaggccgtgaggctcttgttcagtggcaggaaccattacgatctgcttgtatga

SEQ ID NO: 191 - protein, 228 aa, Fragaria vesca
MAHKLSNEAVLEQLKNGFAQFELVSSPLLSISASISQPNATPFTGDHSHRFFARIGPPLGRGSSAMRKVERYSVQRVTGDGRCLFRALVKGMAANKGSPLSPREERDNADELRMAVKEVICENEEERPQYEAALVAITVDEPLKRYCQRIQRPDFWGGESELLVLSKLCRQPIIVYIPEHEHTNGGRGSGFIPIAEYGREFSKGSRNRKPRKAVRLLFSGRNHYDLLV

SEQ ID NO: 192 - DNA, 789 bp, Gossypium hirsutum
atgaagaagatgaaaggggttgctgctgctgccgccgtcatggcttattctccatatgatatgtatgatgaccaaagagcgaggttcaggtatccaactcatatggaagatattgaggacttgcacaaggaaacagagtccatgaggaagaaattgcagatgatgaaagaacaaagattgaccctgttggcagaagtcaagtttttgaaaagaaggcacaagttcctgatgcaagaccaatcttcaaaaccccaagcggaacgacattttttgcaaccacaggatattgtgattagaagcaaatcaaatatgaaagcaaagaaatccactggaaagggtacatcgtcgaaccgagctatggcttttcatctgaaccaaaagggaaagacaaatagtgtaaagggaacctgtttcactcatcctgcccttatgttggacgtaaaccggaagcagcagaaaatttccagtggaaaggaagttactttgcgaagttctttatcggttctcgacttaaaccagagggacaggctttatggtggaaaagaggccgctgctcaaagcataaaaccgatttttgacctaaaccagatttcgagggaggaagaagaactagaagctcaaactaattcagtgagaattgaggaatttaaaagaagttcaaccagaatcggaagtgatgagcagcaccaggatgtcaaaatatcagcctgcaggaacactggaaatgggccaaacagaacaggaaaaagaaagatctcatggcaagatcaggtggcattgagggcttaa

SEQ ID NO: 193 - protein, 262 aa, Gossypium hirsutum
MKKMKGVAAAAAVMAYSPYDMYDDQRARFRYPTHMEDIEDLHKETESMRKKLQMMKEQRLTLLAEVKFLKRRHKFLMQDQSSKPQAERHFLQPQDIVIRSKSNMKAKKSTGKGTSSNRAMAFHLNQKGKTNSVKGTCFTHPALMLDVNRKQQKISSGKEVTLRSSLSVLDLNQRDRLYGGKEAAAQSIKPIFDLNQISREEEELEAQTNSVRIEEFKRSSTRIGSDEQHQDVKISACRNTGNGPNRTGKRKISWQDQVALRA

SEQ ID NO: 194 - DNA, 780 bp, Glycine max
atgaagaagatgaaaggggttgtccccatggaacctccttatgaggtgtaccaggatcagagggccaggttgagacaccagagtctcttgcaggactatgaagacctgcacaaggaaacagaagccatgagaaggaaattgcaggctacgaagcagaaaaagtttatgctggaagatgaagttagatttttgaggcaacgttacaattacttgctaaaacaccctattctaaagcctcaaccaaagcaacaagttgtaaagccacaaaagctcaaaatccaagctcccatcatctcaaagggaaagaattacaacaagaaggagcctaacctgcgaccccaccaccctgcatctcatttgaactcaaatggaaggatttccaatgtggctgatgtcccactgaaaaaaactggccacttgtttgatctaaacctgaatgctaggagttctagtaaaaaagatgcttccattaacatttctggtccaccagtgcttaacttgaatcacaaagaaaggattaacagcagcaaggaagccacgaagaagagtgtaactccatttttcgacttgaaccagatttcgagagaagaggaggaattgcagggaaacagtgagcccatgggaatcgaagaaccaaagagaagttcacaaagagttgcgactgacgagcagcatggcgatatcaagctctcggctgcttgtagaagtgttggggatggatctaatagggcagggaagaggaagatttcatggcaagaccaggtggcattgagggtttga

SEQ ID NO: 195 - protein, 259 aa, Glycine max
MKKMKGVVPMEPPYEVYQDQRARLRHQSLLQDYEDLHKETEAMRRKLQATKQKKFMLEDEVRFLRQRYNYLLKHPILKPQPKQQVVKPQKLKIQAPIISKGKNYNKKEPNLRPHHPASHLNSNGRISNVADVPLKKTGHLFDLNLNARSSSKKDASINISGPPVLNLNHKERINSSKEATKKSVTPFFDLNQISREEEELQGNSEPMGIEEPKRSSQRVATDEQHGDIKLSAACRSVGDGSNRAGKRKISWQDQVALRV

SEQ ID NO: 196 - DNA, 774 bp, Glycine max
atgaagaagatgaaaggggttgtctccttggaccctccttatgaggtatatcaggatcagagggccaggctgaggcaccagagtctcttgcaggactatgaagacctgcacaaggaaacagaagccatgagaaggaaattgcaggctacgaggcagaaaaagttgatgctggaagatgaagttagatttttgaggcaacgttacaattacttgctaaaacaccctattctaaagcctcatccaaagcaagttgtaaagccacaaaagctcaaattgcaagcacccatcatctcgaagggaaagaattacagcaggaaggagcctactctgcgaccccaccccacatctcatttgaactcaaatggaaggatttccaatgtggctgaagccccattgaaaaaaactggccacttgtttgatctaaaccttaatgctaggagttctagtaaaaaagatgcttcctttaacggttctgctccaccagtgtttgagttgaatcacaaagaaaggattcacagcagcaaggaagccacaaagaagagtgtaactccatttttcgacttgaaccagatttcgagagaagaggaggaattgcaggggaacagtgaggccatgaggattgaagaaccaaagagaagtacacaaagagttgcgactgacgagcagcacagcgacatcaagctctcggctgcctgtagaagtgttggggatggatcaaatagggcagggaagaggaagatttcatggcaagaccaggtggctttgagggtttga

SEQ ID NO: 197 - protein, 257 aa, Glycine max
MKKMKGVVSLDPPYEVYQDQRARLRHQSLLQDYEDLHKETEAMRRKLQATRQKKLMLEDEVRFLRQRYNYLLKHPILKPHPKQVVKPQKLKLQAPIISKGKNYSRKEPTLRPHPTSHLNSNGRISNVAEAPLKKTGHLFDLNLNARSSSKKDASFNGSAPPVFELNHKERIHSSKEATKKSVTPFFDLNQISREEEELQGNSEAMRIEEPKRSTQRVATDEQHSDIKLSAACRSVGDGSNRAGKRKISWQDQVALRV

SEQ ID NO: 198 - DNA, 738 bp, Helianthus annuus
atgagtaagaagatgaaaggggttgcttttgatccgtctccttatgaggatgttagggcaagatttaagcaccaaacccttgttcaagattttcttgagttgcaacaggaaacagaggctgcaagaaaccaattggaggcaatgaagcaaaagaaacaaactttagaagctgaagttaggttcttgaggcgtcgacgcaagtttttattgaaaacgagatcatcaacttcacaagaagtgattttaccgaatatagaaacaacccaatacaggaaaagcaagaaggagaaggttaataacccgaagaagggtacgactttgacgaatttgcccccgactccaaacgtaatccagagggggaaaatgtatacaaagaagaaaaacgttattaataacgaaccacctaacgcggttaacttgggaagaaatgtaaatttgtatggtgtcgatctaaaccaaagggttatagggaacaattcgtttccagtgaccgaatttattcagaaagaaaacggtgttagtggtgagaaaccgttggttcaagcgcgtgctcctatattcgacttgaaccagatatcaatggaagaagaagaagtgcaagagagctttgacgatcaaagaaaagaacaacagaacgatttaatgctatcggtttgtaggaacgttggcgatggttcaacgaatcgatcagggaagaggaagatatcatggcaagatcctgtggctttgcgcgtatga

SEQ ID NO: 199 - protein, 245 aa, Helianthus annuus
MSKKMKGVAFDPSPYEDVRARFKHQTLVQDFLELQQETEAARNQLEAMKQKKQTLEAEVRFLRRRRKFLLKTRSSTSQEVILPNIETTQYRKSKKEKVNNPKKGTTLTNLPPTPNVIQRGKMYTKKKNVINNEPPNAVNLGRNVNLYGVDLNQRVIGNNSFPVTEFIQKENGVSGEKPLVQARAPIFDLNQISMEEEEVQESFDDQRKEQQNDLMLSVCRNVGDGSTNRSGKRKISWQDPVALRV

SEQ ID NO: 200 - DNA, 738 bp, Helianthus argophyllus
  misc_feature (342)..(342): n is a, c, g, or t
atgagtaagaagatgaaaggggttgcttttgatccggctccttatgaggatgttagggcaagatttaagcaccaaacccttgttcaagattttcttgagttacaacaggaaacagaggctgcaagaaaccaattggaggcaatgaagcaaaagaaacaaactttagaagctgaagttaggttcttgaggcgtcgacgcaaatttttattgaaaacgagatcatcaacttcacaagaagtgattttaccgaatatagaaacgacccaatacaggaaaagcaagaaggagaaggttaataacccgaagaagggtgcgactttgacgaatttgcccccgactccnaacgtaatccagagggggaaaatgtatacaaagaagaaaaacgttactaataacgaaccacctaacgtggttaacttgggaagaaatgtaaatttgtatggtgtcgatctaaaccaaagggttatagggaacaattcgtttccagtgaccgaatttgttcaaaaagaaaacggtgttagtggtgagaaaccgttggttcaagcgcgtgctcctatattcgacttgaaccaaatatcaatggaagaagaagaagtgcaagagagctttgacgatcaaagaaaagaacaacagaatgatttaatgctatcggtttgtaggaacgttggcgatggctcaacgaatcgatcagggaagaggaagatttcgtggcaggatcctgtggctttgcgcgtatga

SEQ ID NO: 201 - protein, 245 aa, Helianthus argophyllus
MSKKMKGVAFDPAPYEDVRARFKHQTLVQDFLELQQETEAARNQLEAMKQKKQTLEAEVRFLRRRRKFLLKTRSSTSQEVILPNIETTQYRKSKKEKVNNPKKGATLTNLPPTPNVIQRGKMYTKKKNVTNNEPPNVVNLGRNVNLYGVDLNQRVIGNNSFPVTEFVQKENGVSGEKPLVQARAPIFDLNQISMEEEEVQESFDDQRKEQQNDLMLSVCRNVGDGSTNRSGKRKISWQDPVALRV

SEQ ID NO: 202 - DNA, 678 bp, Helianthus tuberosus
atggcggccaaacgctccaacggtgctatccttgaagacctacgaaccggattagcggagttcgaactcgtatcatctccggtcaccacaatcgccactcgcaattccgtacaatccgtttttcttaccgatcacactcacagattcttcgcccgaattggaccaaaattggaagtttcaccagcgttgagcaaagtggagagttttagggttcacagagttaccggtgatggacgctgtatgtttcgggctctggttaaaggaatggctatgaacaagagccttactcttagcctccgagaagaaagagacaatgcagatgaactgcggatggcaataaaagaggtgttatgcgacaatgccaaagaaagacatcaatacgaagaagcgatgattgcaattacagttgaagaatccttaaaacgttactgtcaacgcattggacggccagatttttggggaggagagtcagaactactggtactctccaagttatgtcgtcaacctatcgttgtctatatacccgagcatgagcatacaagagcttataatgggtcgggtttcatacccattgctgaatatggaggtgaatttggcaagagttcgaaacaagaaaagcccaagaaagctgtgaggcttttgtacagtggaagtaatcattatgatctacttgtataa

SEQ ID NO: 203 - protein, 225 aa, Helianthus tuberosus
MAAKRSNGAILEDLRTGLAEFELVSSPVTTIATRNSVQSVFLTDHTHRFFARIGPKLEVSPALSKVESFRVHRVTGDGRCMFRALVKGMAMNKSLTLSLREERDNADELRMAIKEVLCDNAKERHQYEEAMIAITVEESLKRYCQRIGRPDFWGGESELLVLSKLCRQPIVVYIPEHEHTRAYNGSGFIPIAEYGGEFGKSSKQEKPKKAVRLLYSGSNHYDLLV

SEQ ID NO: 204 - DNA, 681 bp, Hordeum vulgare
atgaagagggccaacaaggtggtcctggcccagccggccgcggcggcggcgccgcctcggctgctgcctcgggcgcccaggcccatccgaggcgacgggggagaggcgtaccggaccagccagaggtaccagagcctccttcaggactacaaggagctcctcaaggaaactgcagcaaagaagaacagattgcatttggagaagctgaagaagcaaaggctttcggccgaagtcaagtttttgcgaagaaggtaccaatccatgtccggaaacccatctcagacatctgtttatagactgaagaaccctgcaatggtgcctactacttcccggaccaccgtgtgggttgatcaccaccggcccattcaggccgttgggagttcaagcaaaggccatcagcctgtgcagcagcaaaagcagcatctggttccgcgggcgtctccaattattgacctcaacggggcttgtgagctgagttcctcggaggagactgaagaatttcatggttacgaggagactgccagggcagataaggtgaacaagtacatgttacaaggcaatgtcgtcgctggtcctagcgactcgaaaatgtcggcgttctgggatgcccggaaccccgcggtggcgcgagccgggaagaggaagatctcatggcaggatcagttggctcttagagtatag

SEQ ID NO: 205 - protein, 226 aa, Hordeum vulgare
MKRANKVVLAQPAAAAAPPRLLPRAPRPIRGDGGEAYRTSQRYQSLLQDYKELLKETAAKKNRLHLEKLKKQRLSAEVKFLRRRYQSMSGNPSQTSVYRLKNPAMVPTTSRTTVWVDHHRPIQAVGSSSKGHQPVQQQKQHLVPRASPIIDLNGACELSSSEETEEFHGYEETARADKVNKYMLQGNVVAGPSDSKMSAFWDARNPAVARAGKRKISWQDQLALRV

SEQ ID NO: 206 - DNA, 768 bp, Lotus japonicus
atgaagaagatgaaaggggttgttgtctctgtggactctcctgtttatgaggatcagaggactaggttgaggcatcagagtctgttgcaggattatgaagaccttctagaggacacaaactccatgaggatgaaattgcaggctgccaagcagaaaaggttgacactgtcagcagaagttagtttcttgaggaagcgttacaaatacttgcttaaaaatccatctccaaagctgcaaccaaagcaagacatttcacagccgcgaaagctcaaaatccaagctaaccttattccaaagggccagaagtacaatagaaaggaatctatgcagcccccagttgctcctcattggaattcaaatggaaggatttccaatggtgctgagatcaacacattgcagaaaaaggctcctatgtttgatttgaaccagaatgctaggagtctcagtagaaaagatccttcttttctcagttctgctccgccactcgacttgaatcacaaagatatgagtcacagtatgaaagaaccagcaaagaagagcataacaccattttttgacttgaaccagattgcgagagaagaggaggaattactggttactgagcccgttaggattgaagaaccgaagagaattacacaaagagatgcgagtgaagagcagctcaatgacatcatgttgtcagtttgtagaaacgatgggagcggatcaagtaggacatcagtaaagaggaagatctcatggcaagatcaggtggctttgagggtttga

SEQ ID NO: 207 - protein, 255 aa, Lotus japonicus
MKKMKGVVVSVDSPVYEDQRTRLRHQSLLQDYEDLLEDTNSMRMKLQAAKQKRLTLSAEVSFLRKRYKYLLKNPSPKLQPKQDISQPRKLKIQANLIPKGQKYNRKESMQPPVAPHWNSNGRISNGAEINTLQKKAPMFDLNQNARSLSRKDPSFLSSAPPLDLNHKDMSHSMKEPAKKSITPFFDLNQIAREEEELLVTEPVRIEEPKRITQRDASEEQLNDIMLSVCRNDGSGSSRTSVKRKISWQDQVALRV

SEQ ID NO: 208 - DNA, 570 bp, Lactuca saligna
atgacactcgaagacaccatgaaggttgaggtagaatccgaatgcccaccggagccaccagtcgccgccgtcgagaaagctatcgtcccagtcgaaccccatgttcatgaagaaaaacctaccgatgatactaaagctctcgccataatcgaaaaaccaacggaagtgtgtgaggagaaacctaaagagggttctatcaacagagatgatgttcttgctaaagttgcaacagagaagaagttagctcttattacagcatgggaagaaagcgagaagtctaaagctgaaaacaaagctcaacagaagctatcttccatcattgcatgggaaaacagcaagaaagccgacctagaggcagaattgaagaagatggaggaggatttggagaagaagaaggcaaagtatatagagaagatgaagaacaaaatagttcttctccataaaaaagcagaagaaaagaaagccattgcagaagccaaatgcggagaagatcttattaaagccgaagaggttgcagccaagtgtcgagctactggcgaaaccccaaagaaactgcttggatggttttaa

SEQ ID NO: 209 - protein, 189 aa, Lactuca saligna
MTLEDTMKVEVESECPPEPPVAAVEKAIVPVEPHVHEEKPTDDTKALAIIEKPTEVCEEKPKEGSINRDDVLAKVATEKKLALITAWEESEKSKAENKAQQKLSSIIAWENSKKADLEAELKKMEEDLEKKKAKYIEKMKNKIVLLHKKAEEKKAIAEAKCGEDLIKAEEVAAKCRATGETPKKLLGWF

SEQ ID NO: 210 - DNA, 687 bp, Lactuca sativa
atggcggcgaaaccctctaacggaattatccttgaagaactgagaaatggtgtggcggagttcgaactcgtctcgtctccagtcacttcaatttctaccaacgtttatcgaaatcccatacgatttgttttcataactgaccacacccatcgattcttcgcgcgaattggacaaaaaatggaagtttcaccagcattgagcaaagtggagagctttagggtgcacaaagttactggtgatggacgttgtatgtttcgtgctttggtgaaaggaatggctatgaacaagagtgttaatcttagccttcgtgaagaaagagaaaatgcagatgagctacgcatggcaataaaagaggtgttatgtgataatgagaaagaaagacataagtatgaagaagcattgattgccattactgttgaagaacccttaaaacgttactgtctacgcattggacgaccagatttttggggaggggagtcggaattactggtgctttccaagttatgtcgtcaacctattgtggtctatatacctgaacatgagcattcaagagggggctatggatctggttttataccgatagctgagtatggagccgactttgggaagggctcgagaaaagaaaaaggcaagaaagctgtgaagcttttgtacagtggaagaaatcattatgatctccttgtataa

SEQ ID NO: 211 - protein, 228 aa, Lactuca sativa
MAAKPSNGIILEELRNGVAEFELVSSPVTSISTNVYRNPIRFVFITDHTHRFFARIGQKMEVSPALSKVESFRVHKVTGDGRCMFRALVKGMAMNKSVNLSLREERENADELRMAIKEVLCDNEKERHKYEEALIAITVEEPLKRYCLRIGRPDFWGGESELLVLSKLCRQPIVVYIPEHEHSRGGYGSGFIPIAEYGADFGKGSRKEKGKKAVKLLYSGRNHYDLLV

SEQ ID NO: 212 - DNA, 570 bp, Lactuca sativa
atgacactcgaagacaccatgaaggttgaggtagaatccgaatgcccaccggagcctccagtcgccgccgtcgagaaagctatcgtcccagtcgaaccccatgttcatgaagaaaaacctaccgatgatactaaagctctcgccataatcgaaaaaccaacggaagtgtgtgaggagaaacctaaagagggttctatcaacagagatgatgttcttgctaaagttgcaacagagaagaagttagctcttattacagcatgggaagaaagcgagaagtctaaagctgaaaacaaagctcaacagaagctatcttccatcattgcatgggaaaacagcaagaaagccgacctagaggcagaattgaagaagatggaggaggatttggagaagaagaaggcaaagtatatagagaagatgaagaacagaatagttcttctccataaaaaagcagaagaaaagaaagcgattgcagaagccaaatgcggagaagatcttattaaagccgaagaggttgcagccaagtgtcgagctactggcgaaaccccaaagaaactgctgggatggttttaa

SEQ ID NO: 213 - protein, 189 aa, Lactuca sativa
MTLEDTMKVEVESECPPEPPVAAVEKAIVPVEPHVHEEKPTDDTKALAIIEKPTEVCEEKPKEGSINRDDVLAKVATEKKLALITAWEESEKSKAENKAQQKLSSIIAWENSKKADLEAELKKMEEDLEKKKAKYIEKMKNRIVLLHKKAEEKKAIAEAKCGEDLIKAEEVAAKCRATGETPKKLLGWF

SEQ ID NO: 214 - DNA, 642 bp, Lactuca serriola
atggcggcgaaaccctctaacggaattatccttgaagaactgagaaatggtgtggcggagttcgaactcgtctcgtctccagtcacttcaatttctaccaacgtttatcgaaatcccatacgatctgttttcataactgaccacacccatcgattcttcgcgcgaattggacaaaaaatggaagtttcaccagcattgagcaaagtggagagctttagggtgcacaaagttactggtgatggacgttgtatgtttcgtgctttggtgaaaggaatggctatgaacaagagtgttaatcttagccttcgtgaagagagagaaaatgcagatgagctacgcatggcaataaaagaggtgttatgtgataatgagaaagaaagacataagtatgaagaagcattgattgccattactgttgaagaacccttaaaacgttactgtcaacgcattggacgaccagatttttggggaggggagtcggaattactggtgctttccaagttatgtcgccaacctattgtggtctatatacctgaacatgagcattcaagagggggctatggatctggttttataccgatagctgagtatggagccgactttgggaagggctcgagaaaagaaaaggcaagaaagctgtga

SEQ ID NO: 215 - protein, 213 aa, Lactuca serriola
MAAKPSNGIILEELRNGVAEFELVSSPVTSISTNVYRNPIRSVFITDHTHRFFARIGQKMEVSPALSKVESFRVHKVTGDGRCMFRALVKGMAMNKSVNLSLREERENADELRMAIKEVLCDNEKERHKYEEALIAITVEEPLKRYCQRIGRPDFWGGESELLVLSKLCRQPIVVYIPEHEHSRGGYGSGFIPIAEYGADFGKGSRKEKARKL

SEQ ID NO: 216 - DNA, 687 bp, Lactuca virosa
atggcggcgaaaccctctaacggagtcatccttgaagaactgagaaatggtgtggcggagttcgaactcgtctcgtctccagtcacttcaatttctaccaacgtttatcggaatcccatacgatctgttttcataactgaccacacccatcgattcttcgcgcgaattggacaaaaaatggaagtttcaccagcattgagcaaagtggagagctttagggtgcataaagttactggtgatggacgctgtatgtttcgtgctttggtgaaaggaatggctatgaacaagagtgttaatcttagcctccgtgaagaaagagaaaatgcagatgagctacgcatggcaataaaagaggtgttatgtgataatgagaaagaaagacataagtatgaagaagcattgattgctatcactgttgaagaacccttaaaacgttactgtcaacgcattggacgaccagatttttggggaggggagtcggaattactggtgctttccaagttatgtcgccaacctattgtggtctatatacctgaacatgagcattcaagaggcggctatgaatctggttttataccaatagctgagtatggagccgactttggcaagggctcaagaaaagaaaaaggcaagaaagctgtgaggcttttgtacagtggaagaaatcattatgatctccttgtataa

SEQ ID NO: 217 - protein, 228 aa, Lactuca virosa
MAAKPSNGVILEELRNGVAEFELVSSPVTSISTNVYRNPIRSVFITDHTHRFFARIGQKMEVSPALSKVESFRVHKVTGDGRCMFRALVKGMAMNKSVNLSLREERENADELRMAIKEVLCDNEKERHKYEEALIAITVEEPLKRYCQRIGRPDFWGGESELLVLSKLCRQPIVVYIPEHEHSRGGYESGFIPIAEYGADFGKGSRKEKGKKAVRLLYSGRNHYDLLV

SEQ ID NO: 218 - DNA, 666 bp, Mesembryanthemum crystallinum
atggcagccacattttcaaacgacagtattctccaacaattgagaaatggagctgctcaattcgagctggtgacctctctggctccttcagtttctgaatcaaaagcttttgcaagccctttacagttcttacagaacaataacactgccgggttctttgctagaatcggaccttcattaggggcagcagcatctacgtcaagtgccaaaaagggggagcactatgcagttcaaaaggttgctggggatggccgttgcatgtttcgcgctctggtcaaaggcatggctaggaacaagggcatccctcttacatcatggcaagagagagatgatgctgatgagttaaggactgctgtgaaagaggtgatatgtgaaaatgatacagagcgtcgtcagtatcaagaagcagttgttgcaattactgttgaagagcctttgaaacgatactgccagcgcattggccaatctgacttctggggaggggagtctgaactgctggtgttgtcaaagttgtgctgtcaaccaatcattgtgtatataccagcgcatgagctccttgctcaaatacatacacaagaagcagagaagatgcatgggaatccatcagtggcaccgaaaagctcaattttcataagagtggcaatggctctggttttattccgatag

SEQ ID NO: 219 - protein, 221 aa, Mesembryanthemum crystallinum
MAATFSNDSILQQLRNGAAQFELVTSLAPSVSESKAFASPLQFLQNNNTAGFFARIGPSLGAAASTSSAKKGEHYAVQKVAGDGRCMFRALVKGMARNKGIPLTSWQERDDADELRTAVKEVICENDTERRQYQEAVVAITVEEPLKRYCQRIGQSDFWGGESELLVLSKLCCQPIIVYIPAHELLAQIHTQEAEKMHGNPSVAPKSSIFIRVAMALVLFR

SEQ ID NO: 220 - DNA, 786 bp, Medicago truncatula
atgatgaagaagatgaagggtgtttctgcttccatgaaccctccacctgatgtttacatggatcatagatccatgatgaggcatcagagtctcttgcaagactatgaagatttgaacaaggaaacagaagccatgagaaggaaattggaggctgttaagcagaaaaagttgatactatcggctgaagttcgatttttaaggcaacgttacaagtacttgcttaaacatcctcttccaaagcctcaacctaatcaagaagttttaaagcctcagaagctcaaaatcaaagagcctaagattgcaaagggaaggaattacaatagaaaggaatctactttgcgacctcatgccgcttctaaattgaacccaaaagaaagagttttcaatggacgagctgtagaagacacactgcagaaaactagccatgtgtttgacttgaaccagaacggtaggagcttgaataaaaaagacgcttcttttcatagttctgctgctcctgtgcttgactccaaccacaaagatagggttcaaagtggaaaggaagccgccaagaagagtgtaactccgttcttcgatttgaaccagatttcgagagaagaggaggaattggagggagataatcagtccatgtggattgaagaacaaaagaagaatgcacaaagagttgtgaatgaagagcagatcaatgatatcaagctttcagtttgtagaaacattggagaaggatcaagtagggcggggaaaaggaagattacatggcaagaccaagtggcattaagggtttga

SEQ ID NO: 221 - protein, 261 aa, Medicago truncatula
MMKKMKGVSASMNPPPDVYMDHRSMMRHQSLLQDYEDLNKETEAMRRKLEAVKQKKLILSAEVRFLRQRYKYLLKHPLPKPQPNQEVLKPQKLKIKEPKIAKGRNYNRKESTLRPHAASKLNPKERVFNGRAVEDTLQKTSHVFDLNQNGRSLNKKDASFHSSAAPVLDSNHKDRVQSGKEAAKKSVTPFFDLNQISREEEELEGDNQSMWIEEQKKNAQRVVNEEQINDIKLSVCRNIGEGSSRAGKRKITWQDQVALRV

SEQ ID NO: 222 - DNA, 684 bp, Oryza sativa
atgaagaaggctaaggtggtgttggctcagccggcggcgagggcgccgccgtcgccgctgctgccgagggcgccggggcacagccgtggcggcggcgttggtggcggggaagaggcgtacagggcgagggccaagtacaagaatcttctccaggactacaaggagctcctcgaggaaactgaagcaaagaagaagagattacagatggagaagctcaagaaacagaggcttttggctgaagtcaagtttttgcggaaaaggtacaaatccatgtccgaaaatccatcccagacgtttgtctatagagtaaagaatccggcattgccgcccacattgcggcaacctggttggtctcatggtgaagagtaccacacggttcgggctatcggaagctctagcaaaggcccatcggcgcaccggaggctgaatgctgctccaagagcatctccggtgattgacctcaacgaggcctgcgagccgagttcagaagagatggaggagcttcatggttaccaggaacctgttagggttggcagggtcatgaggtacccaatggagggtgattttgccgccggtcctagtgatgcgaaaatggcggcattctgggatgtccggaacgccgcctcctcccgagctgggaagaggaagatatcatggcaggatcagttagctctcagagtatag

SEQ ID NO: 223 - protein, 227 aa, Oryza sativa
MKKAKVVLAQPAARAPPSPLLPRAPGHSRGGGVGGGEEAYRARAKYKNLLQDYKELLEETEAKKKRLQMEKLKKQRLLAEVKFLRKRYKSMSENPSQTFVYRVKNPALPPTLRQPGWSHGEEYHTVRAIGSSSKGPSAHRRLNAAPRASPVIDLNEACEPSSEEMEELHGYQEPVRVGRVMRYPMEGDFAAGPSDAKMAAFWDVRNAASSRAGKRKISWQDQLALRV

SEQ ID NO: 224 - DNA, 678 bp, Passiflora edulis
atgaagaagggcaagaaggtcgtcttggcgcagcctgtggtggcggcgtcgtcgccgctctctcgtgcggcgaggcccgtccatggcggtgttggtggcgggggtgaggcgtacagggcgaggctcaggtaccagagcctcctccaggactaccaggagctcgtcaaggaaactgaagcaaagaagaagctattgcatatgaagaagctgaagaagcagaggcttttgggcgaagtcaagtttttgcggagaaggtacaaatccatgtctgaaaatccttctcagacagttgtttacagactgaagaatccagcaatgccacccgcattgcgggccactgcttgggctcacgacgaagagcacaggccggttcaggctgttgggagctcaagcaaaggtccatccgtgcagcagcgaagacaacattccgctccaagagcatctccagtgatcgacctcaacgaggcttgtgagccgagttttgaggagatggaggaatttcatggtcaccaggagcctgttagggctgagaaggcgaagaagtgcccattggaaggtggcgttgccaccggtcccggtgatgcaaaaataccggcattctggaatgtccgtaatgcggcggggcgagctgggaagaggaagatctcatggcaggatcaattagctctgagggtctag

SEQ ID NO: 225 - protein, 225 aa, Passiflora edulis
MKKGKKVVLAQPVVAASSPLSRAARPVHGGVGGGGEAYRARLRYQSLLQDYQELVKETEAKKKLLHMKKLKKQRLLGEVKFLRRRYKSMSENPSQTVVYRLKNPAMPPALRATAWAHDEEHRPVQAVGSSSKGPSVQQRRQHSAPRASPVIDLNEACEPSFEEMEEFHGHQEPVRAEKAKKCPLEGGVATGPGDAKIPAFWNVRNAAGRAGKRKISWQDQLALRV

SEQ ID NO: 226 - DNA, 666 bp, Picea glauca
atgtcgaagaagcgcggatctgacggcgaatttggcacagaagatctgagaaggatggccatgaagcatgccagcctcaagcaggaatacaatgaattacagagggaaactcgggccatgaaaaagaggctgcaaagagcgaagctgaagaaagagaatcttctagcggaagtcagatttttgagaaagagacacaggctcctaacgaaaaggggatcacaatttagtgagggctccccctctcggaaacaaactcttctggcccaggctgaatatgcagtgcctctgaaaactcctctggcaacgcaagccataccctatgaatatgactatgcaaccacgggaacctcctctgatgaggacggcataccccaagcggtcaggaaagattcatcttcatcaatggagttctctcattctcctgaaactaagcctttggttacaaaggagttccaagtattctgggagcccctcaggacagcggcatccgcaggccgagaagaagctccaactatgtctgagaccgcaaaaaagaagcctcctcctcttgttgaaagtgatctaaatttgtccatattcaaagacgttccaaatggattccttcttcctaacaggacaggaaaaagaaaaatctcatggcaggatcagatggctctgaaagtgtaa

SEQ ID NO: 227 - protein, 221 aa, Picea glauca
MSKKRGSDGEFGTEDLRRMAMKHASLKQEYNELQRETRAMKKRLQRAKLKKENLLAEVRFLRKRHRLLTKRGSQFSEGSPSRKQTLLAQAEYAVPLKTPLATQAIPYEYDYATTGTSSDEDGIPQAVRKDSSSSMEFSHSPETKPLVTKEFQVFWEPLRTAASAGREEAPTMSETAKKKPPPLVESDLNLSIFKDVPNGFLLPNRTGKRKISWQDQMALKV

SEQ ID NO: 228 - DNA, 669 bp, Picea sitchensis
ctgatcctgccatgagatttttctttttcctgtcctgttaggaagaaggaatccatttggaacgtctttgaatatggacaaatttagatcactttcaacaaggggaggaggaggcttcttttttgcggtctcagacatagttggagcttcttctcggcctgcggatgccgctgtcctgaggggctcccagaatacttggaactcctttgtaaccaaaggcttagtttcaggagaatgagagaactccattgatgaagatgaatctttcctgaccgcttggggtatgccgtcctcatcagaggaggttcccgtggttgcatagtcatattcatagggtatggcttgcgttgccagaggagttttcagaggcactgcatattcagcctgggccagaagagtttgtttccgagagggggagccctcactaaattgtgatccccttttcgttaggagcctgtgtctctttctcaaaaatctgacttccgctagaagattatctttcttcagcttcgctctttgcagcctctttttcatggcccgagtttccctctgtaattcattgtattcctgcttgaggctggcatgcttcatggccatccttctcagatcttctgtgccaaattcgccgtcagatccgcgcttcttcgacatgtttcccagatcttcaag

SEQ ID NO: 229 - protein, 222 aa, Picea sitchensis
MSKKRGSDGEFGTEDLRRMAMKHASLKQEYNELQRETRAMKKRLQRAKLKKDNLLAEVRFLRKRHRLLTKRGSQFSEGSPSRKQTLLAQAEYAVPLKTPLATQAIPYEYDYATTGTSSDEDGIPQAVRKDSSSSMEFSHSPETKPLVTKEFQVFWEPLRTAASAGREEAPTMSETAKKKPPPPLVESDLNLSIFKDVPNGFLLPNRTGKRKISWQDQMALKV

SEQ ID NO: 230 - DNA, 669 bp, Pinus taeda
atgtcgaagaagcgcggatctgatggcgaatttggcacagaagatctgagaaggatggccatgaagcatgccagcctcaagcaggaatacaacgaattacagagggaaactcgggccatgaaaaaacggctgcaaagggcgaagctgaagaaagggaatcttctagcggaagtcaggtttttgagaaagagacacaggcttctaacgaaaaggggatcacaatttaatgagggctccccttctcagaaacaaacttttttagcacaggctgaatatgcgatgcctctgaaaacttctctgacagcacaagccataccctatgaatatgaatatacaacaacgggaacttcctctgatgaggatggcataccccaagcggccaggaaagactcatcttcgtcaatggagttcactcattctccagaaactaagcctttggttacaaaggagttccaagtattctgggagcccctcaggacagcggcatcagcaggccgagaagaagctccaactatgactgaaactgcaaaaaggaagcctcctacttctgttgttgaaagtgatttaaatttgtccatattcaaggatgttccaaatggattccttcttcctaataggactggaaaaagaaaaatctcatggcaggatcagatggctctgaaagtgtaa

SEQ ID NO: 231 - protein, 222 aa, Pinus taeda
MSKKRGSDGEFGTEDLRRMAMKHASLKQEYNELQRETRAMKKRLQRAKLKKGNLLAEVRFLRKRHRLLTKRGSQFNEGSPSQKQTFLAQAEYAMPLKTSLTAQAIPYEYEYTTTGTSSDEDGIPQAARKDSSSSMEFTHSPETKPLVTKEFQVFWEPLRTAASAGREEAPTMTETAKRKPPTSVVESDLNLSIFKDVPNGFLLPNRTGKRKISWQDQMALKV

SEQ ID NO: 232 - DNA, 768 bp, Populus trichocarpa
atgaagaagatgaaaggggttgctgctgctgcggactctcctcctccttcatatgctaccatgtatgaagatccaaggatcatgttcaagcatcagagtcttatgcaggactacgaggaattatacaaggaaacagaagcgaagaaaaggaaattgcagatggtgagacagaaaaaattaaccttaatggctgaagtcaggtttttgagacgacgatacaaatacttgacacaaaacaagcctaagaaagcccctatggagcgaagttttgtgcaaccacagaacttagtacctgctagtaaaaatttaaagaaggaaaagagctatagtggaaataatgctgctctgagaccaccagttcctcgttttgatttaaaccagaagggaaagctttacattgaaagggaagccactttgcgaaattccactccaatttttgacttaaaccagaagcaaatgactcacattggaaaggaggctgctttgcgaaagacagcaccaatccctgacctgaaccagaaggaaaggatttacagaggaaaggaagccacagttcgaaataatactccaatttttgacttgaatgaaatctcggttaatggtgacatgttgagaacagaggagctaaagattagttcaatgagaggtggtagtgctgagctacataatgatatgaagttatcagcttgtaggaatgtcgggaatggatcaggctgggcagggatgaggaagattatatggcaggatcaggtagcgttgagggtttga

SEQ ID NO: 233 - protein, 255 aa, Populus trichocarpa
MKKMKGVAAAADSPPPSYATMYEDPRIMFKHQSLMQDYEELYKETEAKKRKLQMVRQKKLTLMAEVRFLRRRYKYLTQNKPKKAPMERSFVQPQNLVPASKNLKKEKSYSGNNAALRPPVPRFDLNQKGKLYIEREATLRNSTPIFDLNQKQMTHIGKEAALRKTAPIPDLNQKERIYRGKEATVRNNTPIFDLNEISVNGDMLRTEELKISSMRGGSAELHNDMKLSACRNVGNGSGWAGMRKIIWQDQVALRV

SEQ ID NO: 234 - DNA, 780 bp, Populus trichocarpa
atgaagaagatgaaagctgctgttgctgcgatggacttttctcctccttcatatgctgccatgtatgaagatccaaggatcatgctcaagcatcagagtcttatgcaggactatgatgagttatacaaggaaacagaagccaagaaaaggaaattgcagatgatgagacagaaaaaattgaccctaatggctgaagtcaggtttttgagacgacgatacaagtacttgacacaaaacaagtctcagaaacccccaatggagcaaaattttgtgcaaccacagaacttagtaactgctagtaaaaaactaaaggagaagaactcttgtggaaataattcttctctcagaccaccagttccacgttttgatttaaaccagaaaggaaaggtttacattgaaagggaagccactttgcgaaaccctgctccaatttttgacttaaacaagaagcaaaagactcacattggaagggaggttgcattgctaaactcaacaattcctgacctgaacaagaaggaaaggacttacagtgtcaaggaagccactgttcaaaataatactccaatttttgacttgaacgaaatttcgactgaagaggaagaacatgttaacggtgacatgttgagaacagaggagccaaaaattagtttgatgagaggtgctagtgatgagatgcataatgaaaggaagttatcagcttgtaggaatgttggaaatggatccagcagggcagggaagaggaagattacttggcaagatcaggtggctttgagggtttga

SEQ ID NO: 235 - protein, 259 aa, Populus trichocarpa
MKKMKAAVAAMDFSPPSYAAMYEDPRIMLKHQSLMQDYDELYKETEAKKRKLQMMRQKKLTLMAEVRFLRRRYKYLTQNKSQKPPMEQNFVQPQNLVTASKKLKEKNSCGNNSSLRPPVPRFDLNQKGKVYIEREATLRNPAPIFDLNKKQKTHIGREVALLNSTIPDLNKKERTYSVKEATVQNNTPIFDLNEISTEEEEHVNGDMLRTEEPKISLMRGASDEMHNERKLSACRNVGNGSSRAGKRKITWQDQVALRV

SEQ ID NO: 236 - DNA, 693 bp, Panicum virgatum
atggcagccggcaagaaggccagggtcgtcttggcccagccggcggcgggggcgctgccgccgcgcccgccggcgctcttctcccgagcgcccggccccgtccgcggctccggggaggaggaggcgtacagggccaggcttaggtaccaggccctcctccatgactaccaggagctcgtcaaggaagctcaagcaaagaagaggaggctgcacatggagaggctcaacaagcagaggctactggctgaagtcaaattcttgaggaagagatacaaatccatgtctgaaaacccatctcagacaattgtttgtagagtgaggaatccagcaatgcggccggcacgtcgcactgctgcttgggccaatgatgctcagcaccggtcgattcaagccattgggagttccagcagaagccagctggtgcaatggagacaagatgattctccaagagcatctccggtgattgacctcaatgaggcctgtgagccgggttatgagattgaaatgggtgaccatcatggttacggggagcctcttggcatcaacaatgtgaggaggtacccgatggaaggtgtcgctgctgccggccctagcgaggtgcgaattcctgcattctgggatgcccggagtctggagggccgagctgggaagaggaagatctcatggcaggatcagttggccctgagagtatag

SEQ ID NO: 237 - protein, 230 aa, Panicum virgatum
MAAGKKARVVLAQPAAGALPPRPPALFSRAPGPVRGSGEEEAYRARLRYQALLHDYQELVKEAQAKKRRLHMERLNKQRLLAEVKFLRKRYKSMSENPSQTIVCRVRNPAMRPARRTAAWANDAQHRSIQAIGSSSRSQLVQWRQDDSPRASPVIDLNEACEPGYEIEMGDHHGYGEPLGINNVRRYPMEGVAAAGPSEVRIPAFWDARSLEGRAGKRKISWQDQLALRV

SEQ ID NO: 238 - DNA, 816 bp, Panicum virgatum
atggatgatattggtggggagcggggaaggaaaggagacgccctgctgacgccaccacgcggccccggtctcccctcctcttccccgtccccgcccggatctcgcctcctcccctccccatcctccgccgccgtgctcgccctcccggcctcccgtgacccgagcccgggcgccgggttgccggccgcgccccgcctcgccggcgcgatggacggcggcagggagccgctgctcgtgcggaggagcaaggacaagaagaagaagaggcccgcggcggcggcggcgcacgcggagagggacgccggtgccggggacaggtcccgctctctctggcgcgactacaacgacctggtgcaggagactgaggcaaagaagaagaggctactgagcgcaaaccggacaaagctcgccctccttgctgaagtcaagttcttgcgaaggaagtacggatcctttgccaagggcaattcgcagaagacacattacaagctgaagaagaaggctcggtacattccatctccgttgggaagggcttcagcatttgaagatcatgatgtggccaggactgaagggccttcgtccagcaaaaacccaaatgttgacttgaatcaaggatctctagtgaatgatgagaggaatgattgccaagggcataggggccatctagaacctgataagtttgatcaagttggggtggaagaagagatgattgcagcagatgtcaaattatctgtttgtagggatacaggaaactctccgacaagtgatgataagagggcgatcccatggcaagaccaaatggcgttgaaggcctaa

SEQ ID NO: 239 - protein, 271 aa, Panicum virgatum
MDDIGGERGRKGDALLTPPRGPGLPSSSPSPPGSRLLPSPSSAAVLALPASRDPSPGAGLPAAPRLAGAMDGGREPLLVRRSKDKKKKRPAAAAAHAERDAGAGDRSRSLWRDYNDLVQETEAKKKRLLSANRTKLALLAEVKFLRRKYGSFAKGNSQKTHYKLKKKARYIPSPLGRASAFEDHDVARTEGPSSSKNPNVDLNQGSLVNDERNDCQGHRGHLEPDKFDQVGVEEEMIAADVKLSVCRDTGNSPTSDDKRAIPWQDQMALKA

SEQ ID NO: 240 - DNA, 780 bp, Phaseolus vulgaris
atgaagaagatcaaacccgttgtctccatggaccctccttacgaggcgtatcagggtcagaggactcggttcaggcaccagagtctcttgcaggattatgaagacctgcacaaggaaacagaagccgtgagaaggaaattgcaggctacggagcagaaaaggttgatactggaagatgaagttagatttttgaggcatcggttcaaatacttgctaaaacatccgattccaaagcctcaaccaaagaaagaagttgtaaagtcacagaagctcaaaattcaaactcccatcatctcgaagggaaagagttacagtagaaaggatcatacttcgcgatcccactctgcatctcatttgaaccctaatggaaagatatccaatgtggctgaagtgccattgcaaaaaactagccatctgtttgatctaaaccagaatgctaggaattttagttctagtagaaaagacagtactattcactgttctgcttcaccagcacgtgacttgaatcacaaagaaaggcttcacagcagcaaagaagccacaaagaagagtgtagctccattttttgacttgaaccatatatcgagagaagaagaagagttgcaaggcaacagtgagaccatgaggattgaagaaccaaagagaagtacacatagagttggaagtgatgagcagcacaacgatatcaaactctcagcttgtagaagtgttggtgatggatcaaatagggcagggaagaggaagatttcatggcaagaccaggtggcattgagggtttga

SEQ ID NO: 241 - protein, 259 aa, Phaseolus vulgaris
MKKIKPVVSMDPPYEAYQGQRTRFRHQSLLQDYEDLHKETEAVRRKLQATEQKRLILEDEVRFLRHRFKYLLKHPIPKPQPKKEVVKSQKLKIQTPIISKGKSYSRKDHTSRSHSASHLNPNGKISNVAEVPLQKTSHLFDLNQNARNFSSSRKDSTIHCSASPARDLNHKERLHSSKEATKKSVAPFFDLNHISREEEELQGNSETMRIEEPKRSTHRVGSDEQHNDIKLSACRSVGDGSNRAGKRKISWQDQVALRV

SEQ ID NO: 242 - DNA, 831 bp, Sorghum bicolor
atggacgatattgctggggagccgggaaggaaaggggacgactcttcccgtgccgtgctgacgccaccaccacgcggccccggtctcctctcgccctcctctcctccgtctggatctggtcctatcccctccccaccctccgccgccgccgccgctgtcctcgccctcccggcctcagccacgagccagggcgccgggctcctggcctcgtctcgcctcgccggcgagatggacggcggcggggagacgctgctggtgcggaggagcaagggcaagaagaagagaccgcagccggccgcggagaggggctccggcggcagcggggacaggttccgcacgctctggcgggactaccacgacctgctgcaggagactgagggaaagaagaagatgctggcgagcacgaagcggagaagcctcgccttgcttgctgaagtcaagttcttgcgaaggaagtaccaatcctttctcaagggtggctcacagcagaaacattacaagttgaagaagcaagctcggtacatgccatctccattgggaagcaacaaggccaccgcgttaggtgatcatggtgcaaggaccaaagtgccttctaccagcaaaaactcaaaccttcacttaaatcaagattctgttccgaatgatgtggtgaatgatcaccaggggcaacagggccatccagaagtcgaaaagtttgatgaggtcggggtggatgaagatatgatgacacctgatgtcaaattatcagtttgtagggatacaggaaactcgcctgcaagtgaaggtaagaggacggttccatggcaagatcggttagcgttgaaggcctag

SEQ ID NO: 243 - protein, 276 aa, Sorghum bicolor
MDDIAGEPGRKGDDSSRAVLTPPPRGPGLLSPSSPPSGSGPIPSPPSAAAAAVLALPASATSQGAGLLASSRLAGEMDGGGETLLVRRSKGKKKRPQPAAERGSGGSGDRFRTLWRDYHDLLQETEGKKKMLASTKRRSLALLAEVKFLRRKYQSFLKGGSQQKHYKLKKQARYMPSPLGSNKATALGDHGARTKVPSTSKNSNLHLNQDSVPNDVVNDHQGQQGHPEVEKFDEVGVDEDMMTPDVKLSVCRDTGNSPASEGKRTVPWQDRLALKA

SEQ ID NO: 244 - DNA, 726 bp, Sorghum bicolor
atggcggccatcaagaagaccaaggtcgtcttggcgcagccggcggtgggggctccggcgtcgcggccgcccttcttttctcgcgcgccgggcccggtccgaggcgccggcgacgaggcggcgtacagggccagcctcaggtaccgcgccctcctccaggactaccaggagctcatcaaggaaacccaagcaaagaagaagaggctgcacatggagaggctcaggaagcagaggcttttggctgaagtcaaattcttgcggaagagatacaaatccatgtctgaaaacccatctcagacaattgtttgtagactgaggaatccagcaatgtcgtctgcatcctggacagcagcttcggcaggtgatgcccagcaccagtcagttcatggcgtcgggagctcccagcaccagtcagttcatgctgtcaggagctccagtagaagccagttggtgcaccgaaggcacggtggttctccaagggcatctccagtgattgacctcaacgaggcctgtgagctgggttatgaggagatggaaatcgatgagcaccatggttacagggcccctctaggcatcaacaagtcaaagaggtatccgatggaaggtgatgctgctgccggaccaagccaggttagaatgcctgtgttctgggatgtccagaacccagcagggcgatctgggaagaggaagatctcatggcaggatcagttggccctgagagtatag

SEQ ID NO: 245 - protein, 241 aa, Sorghum bicolor
MAAIKKTKVVLAQPAVGAPASRPPFFSRAPGPVRGAGDEAAYRASLRYRALLQDYQELIKETQAKKKRLHMERLRKQRLLAEVKFLRKRYKSMSENPSQTIVCRLRNPAMSSASWTAASAGDAQHQSVHGVGSSQHQSVHAVRSSSRSQLVHRRHGGSPRASPVIDLNEACELGYEEMEIDEHHGYRAPLGINKSKRYPMEGDAAAGPSQVRMPVFWDVQNPAGRSGKRKISWQDQLALRV

SEQ ID NO: 246 - DNA, 555 bp, Solanum chacoense
atgggcgaggaagaagccaagaaagtggagactgctgaacatgtcgcggaggagaaagccatcgtcttatcaactgtacctcctaaagaattggaagacaaacccgatgattccaaagctctcgtcatcgtcgaacccgaaactaaagcgctggtacccgttgagaaaaagggatctattgacagagatgcaactcttgctcggttaacgacagagaagagattgtcgctaatcaaagcatgggaagaaagtgagaaatcaaaagctgaaaacaaagctcagaaaaagcggtctgaaattcttgcatgggagaacagcaagaaagcaagcttggaggctgagctaaaaaggactgaggagcaattgttgaaaaagaaggcagagtacattgagaaactgaaaaacaagattgctctagtccacaagtcagcagaagaaaaaagagcgataactgaagctaaacgtggagaagatcttcttaccgcagaggagatggcagcaaaatgtcgggccactggaagttctccaaagaaaccactccttggatgtttctga

SEQ ID NO: 247 - protein, 184 aa, Solanum chacoense
MGEEEAKKVETAEHVAEEKAIVLSTVPPKELEDKPDDSKALVIVEPETKALVPVEKKGSIDRDATLARLTTEKRLSLIKAWEESEKSKAENKAQKKRSEILAWENSKKASLEAELKRTEEQLLKKKAEYIEKLKNKIALVHKSAEEKRAITEAKRGEDLLTAEEMAAKCRATGSSPKKPLLGCF

SEQ ID NO: 248 - DNA, 582 bp, Saruma henryi
cttaaaccctcaaagctacctgatcttcccatgtaatcttcctcttccccgttctattcggtccattcccaacatctctgcacatagatagattcaggttgcttgatagatcctctcctccttctatggaaggactcttcaattccttgtccatcctcagaggctcccaaacaacatgaaactccatagtttcatctcccggactagagatctggttcaagtcgaagcttggatgaggatttcgcttgacaacttccttctctttgtgttttctctctttcattgtagcagctcctcttaccattcgcgaattctgtttctgggattgcgttagactctcagctggggttttctgtgatgggttttttactagatgtttgtatcttctacgcaagaaactgacttcagctaagagagtgagtctcttctgtttcattttctccaaattttcttttatatcttcggtctccttttgcaattcatcgaagtcccttatgagattctgaagcttgaacctgttcttcgcctcctcaatagcaaaaggagaagattccatcgatacccttttcatcttcttcatca

SEQ ID NO: 249 - protein, 193 aa, Saruma henryi
MMKKMKRVSMESSPFAIEEAKNRFKLQNLIRDFDELQKETEDIKENLEKMKQKRLTLLAEVSFLRRRYKHLVKNPSQKTPAESLTQSQKQNSRMVRGAATMKERKHKEKEVVKRNPHPSFDLNQISSPGDETMEFHVVWEPLRMDKELKSPSIEGGEDLSSNLNLSMCRDVGNGPNRTGKRKITWEDQVALRV

SEQ ID NO: 250 - DNA, 558 bp, Solanum lycopersicum
atgggtgaagaagaagccaagaaagtggagactgctgaacatgccgcggaggagaaagccatcgtcttatcaactgtacctccttctgaagaatcgaaagacaaacccgatgattccaaagctctcgtcatcgtcgaacctgaaactaaagcgctggtacccgttgagaaaaagggatctattgacagagatgcaactcttgctcggttaacgacagagaagagattgtcgctaatcaaagcttgggaagaaagtgagaaagcaaaagctgaaaacaaagctcagaaaaagatagctgaaattcttgcatgggagaacagcaagaaagcaagcttggaggctgagctaaaaaggactgaggagcaattgttgaaaaagaaggcagagtacattgagaaactgaaaaacaagattgctctagtccacaagtcagcagaagaaaaaagagcgataactgaagctaaacgtggagaagatcttcttaccgcagaggagatggcagcaaaatgtcgggccactggaagttctccaaagaaaccactccttggatgtttttga

SEQ ID NO: 251 - protein, 185 aa, Solanum lycopersicum
MGEEEAKKVETAEHAAEEKAIVLSTVPPSEESKDKPDDSKALVIVEPETKALVPVEKKGSIDRDATLARLTTEKRLSLIKAWEESEKAKAENKAQKKIAEILAWENSKKASLEAELKRTEEQLLKKKAEYIEKLKNKIALVHKSAEEKRAITEAKRGEDLLTAEEMAAKCRATGSSPKKPLLGCF

SEQ ID NO: 252 - DNA, 909 bp, Solanum lycopersicum
atgtctaagaagatgaaaagggttgctttagaatcatcaccttatgtggtgtttgaggagaataatgctagattgaagcatcagactctattgcaggactatctggaactccataaggacactaataacacgaggaacaaattggaggacatgaaaatgaggaaacaaaaattacttgctgaagttcatttcttgcgccgaagacacaaatacctattgcagatgaagtcatcaggtcatcttgaacagcaagaacgagcagccctgctgaacacagagttatacggtataaatgggatgaatgatcgatttcatagcaaaaaggaggtgaagcaacacaaactgccccctcttcctaggctgaaacagaaagcgaggattcaagttgcaaaggaagcttcattacagaggacaccttcggatattcttgtgaatcataaacaggcattacagattgggaaagacgctgttcatcgtagtacagtttcttcaggtttgaagcaccaatcaagagtgtatagtggtaaggaaatgctgctccaaaacgcagctccagtgtttgatttgaatcagaatgacaggtcattcgctgggaatggttttgttttgaggagtaccatacccgtctttgatttgaatcaggaaactgattatgttgtgaaagatgttgtattgcctagtcgagctccagtcattgatttgaatgaaatctcgataggggaagaggagcctcaagcaaactttgaaccattgaactttgaggagccaaagagaggactaattcaaaacataaatgacgatcagcacagagacttaaagttatcgatatgcaggaatgtgggagaaggaacttctcatgttgagaagcggaaaatatcttggcaagatcctgttgctttgagggtttga

SEQ ID NO: 253 - protein, 302 aa, Solanum lycopersicum
MSKKMKRVALESSPYVVFEENNARLKHQTLLQDYLELHKDTNNTRNKLEDMKMRKQKLLAEVHFLRRRHKYLLQMKSSGHLEQQERAALLNTELYGINGMNDRFHSKKEVKQHKLPPLPRLKQKARIQVAKEASLQRTPSDILVNHKQALQIGKDAVHRSTVSSGLKHQSRVYSGKEMLLQNAAPVFDLNQNDRSFAGNGFVLRSTIPVFDLNQETDYVVKDVVLPSRAPVIDLNEISIGEEEPQANFEPLNFEEPKRGLIQNINDDQHRDLKLSICRNVGEGTSHVEKRKISWQDPVALRV

SEQ ID NO: 254 - DNA, 558 bp, Solanum tuberosum
atgggtgaagaagaagccaagaaagtggagactgatgaacatgtcgcggaggagaaagccatagtcttatcaactgtacctccttctaaagaattggaagacaaacacgatgattccaaagctctcgtcatcgtcgaacccgaaactaaagcgctggtacccgttgagaaaaagggatctattgacagagatgcaactcttgctcggttaacgacagagaagagattgttgctaatcaaagcatgggaagaaagtgagaaatcaaaagctgaaaacaaagctcagaaaaagcggtctgaaattcttgcatgggagaacagcaagaaagcaagcttggaggctgagctaaaaaggactgaggagcaattgttgaaaaagaaggccgagtacattgagaagctgaaaaacaagattgctctagtccacaagtcagcagaagaaaaaagagcgataactgaagctaaacgtggagaagatcttcttaccgcagaggagatggcagcaaaatgtcgggccactggaagttctccaaagaaaccactccttggatgtttctga

SEQ ID NO: 255 - protein, 185 aa, Solanum tuberosum
MGEEEAKKVETDEHVAEEKAIVLSTVPPSKELEDKHDDSKALVIVEPETKALVPVEKKGSIDRDATLARLTTEKRLLLIKAWEESEKSKAENKAQKKRSEILAWENSKKASLEAELKRTEEQLLKKKAEYIEKLKNKIALVHKSAEEKRAITEAKRGEDLLTAEEMAAKCRATGSSPKKPLLGCF

SEQ ID NO: 256 - DNA, 591 bp, Solanum tuberosum
atggcagaattggaagctaagaaagtagaaattgtggaccctgcccctgcacaagaaccagttgaagctcctaaagaagtggtggctgatgagaaagccatagttgaaccagctccgcctcctcctgcagaagaaaaagaaaaacccgatgactcgaaagtaatcgtcgaacccgaaactaaagcgctggtacccgttgagaaaaagggatctattgacagagatgcaactcttgctcgattaacgacagagaagagattatcgctaatcaaagcatgggaagaaagtgagaaatcaaaagctgaaaacaaagctcagaaaaagcggtctgaaattcttgcatgggagaacagcaagaaagcaagcttggaggctgagctaaaaaggactgaggagcaattgttgaaaaagaaggccgagtacattgagaaactgaaaaacaagattgctttagtccacaagtcagcagaagaaaaaagagcgataactgaagctaaacgtggagaagatcttcttaccgcagaggagatggcaccaaaatgtcgggccactggaagttctccaaagaaaccactccttggatgtttctga

SEQ ID NO: 257 - protein, 196 aa, Solanum tuberosum
MAELEAKKVEIVDPAPAQEPVEAPKEVVADEKAIVEPAPPPPAEEKEKPDDSKVIVEPETKALVPVEKKGSIDRDATLARLTTEKRLSLIKAWEESEKSKAENKAQKKRSEILAWENSKKASLEAELKRTEEQLLKKKAEYIEKLKNKIALVHKSAEEKRAITEAKRGEDLLTAEEMAPKCRATGSSPKKPLLGCF

SEQ ID NO: 258 - DNA, 891 bp, Solanum lycopersicum
atgtctaagaagatgaaaaggggtgctttggaatcatcatcttatggtgtttttgaagacacaaaggataggttgaaacatcaaacacttctgcaggactatcaagagctccagaaggaaactgatgccgcaaggcacaagctggaggattcaaagctgaggaaactaagattacaagctgaagttcgtttcttacgccagaggcacaagcatctattgcaatcgaagtccttaacaactccaaaagggaaagagctagtatccctaccaaatgttgaaacttaccccaggagtaggtcaagggatcaagttacgagaaaaaaggaagccaagctaaacaaactgccccctcttcctggccctaaaccaaacggaaggatacaggttgcaaaggtagttgcttcgcagaacatacccgatattcatgtgaaccaaaagcacagattaggtggtagacaagaatctgtttttcgcaatgcagatttagagttgaaccgtaaatcaagagtatataggggaaaggatgtgtcatcccgaaaaggagctccagcctatgatttgaagcaggatgagagattgtgcatcgcagacaatgctatcttacagagcagctcgccaacttttgatttaaatcaggatgctggtcatagtggcaaagaaactgcattgcccactcgtgctccggtctttgatttgaatgagatctcgatgggagaagaggaaagagatggaaattctgagcaggtgcagctcgaggagccaaagagaagtccaatccaaaacctcaatgatgatgtgaagctattggtgtgtagaaatgttggaggagacacttctcggttgggaaaacaaaaattatcttggcaagaccctgttgctttgagggtttga

SEQ ID NO: 259 - protein, 296 aa, Solanum lycopersicum
MSKKMKRGALESSSYGVFEDTKDRLKHQTLLQDYQELQKETDAARHKLEDSKLRKLRLQAEVRFLRQRHKHLLQSKSLTTPKGKELVSLPNVETYPRSRSRDQVTRKKEAKLNKLPPLPGPKPNGRIQVAKVVASQNIPDIHVNQKHRLGGRQESVFRNADLELNRKSRVYRGKDVSSRKGAPAYDLKQDERLCIADNAILQSSSPTFDLNQDAGHSGKETALPTRAPVFDLNEISMGEEERDGNSEQVQLEEPKRSPIQNLNDDVKLLVCRNVGGDTSRLGKQKLSWQDPVALRV

SEQ ID NO: 260 - DNA, 795 bp, Theobroma cacao
atgaagaagctgaaaggggttgctgctgctgttgccgctatggagtattctccatatgctacgtatgaggaccaaaggaccaggttcaagcaccagagccttatgcaagactttgaagacttgcacaaggaaacagaggccatgagaaagaagttgcagatgatgaaagagcaaaaattgaccctgttggctgaagtccggtttttgaaacggaggcacaagttcttgatgcaaaaccaatcttcaaacacaccagcccaaaaaaacattgtgcaaccacagaatttggtgattagaagtaaatcaaatatgaaggaaaagaaatctaccggaaaggaacgaactatgcaacgcctagctacaggttttgatttgaaccaaaagggaaagacttacagtgaaaaggaaaccactttcactcatccttctctgatgtttgacttaaaccagaagcagcagaaaattttgaacggaaaggaagttactttgctgcgaagttctttaccagttcttgacttaaaccagagggaaagggtttacagtggaaaggaggccactgctcgaagcatgacaccgatttttgacttaaaccagatttcgagagaggaggaagaactacaggctagtgataattcaatgagaatagaggaattcaagaaaagttcaatgagaatcggagctgatgagcagcacaatgatattaaaatatcagcctgcaggaacactggaaacgggccaaaccgagttgcaaaaagaaagatcacatggcaagatccggtggcattgagggtttaa

SEQ ID NO: 261 - protein, 264 aa, Theobroma cacao
MKKLKGVAAAVAAMEYSPYATYEDQRTRFKHQSLMQDFEDLHKETEAMRKKLQMMKEQKLTLLAEVRFLKRRHKFLMQNQSSNTPAQKNIVQPQNLVIRSKSNMKEKKSTGKERTMQRLATGFDLNQKGKTYSEKETTFTHPSLMFDLNQKQQKILNGKEVTLLRSSLPVLDLNQRERVYSGKEATARSMTPIFDLNQISREEEELQASDNSMRIEEFKKSSMRIGADEQHNDIKISACRNTGNGPNRVAKRKITWQDPVALRV

SEQ ID NO: 262 - DNA, 705 bp, Tagetes erecta
atgatgagtaataagatgaaaggggttgcttttgattcatcttctcatggctcttttgaggatgttagggcaagatttaagcatcaaacccttgttcaagattatcttgagttgcaacaggaaacagaggctgcaagaaacaaattggaagctatgaagcaaaagaaacatactttagaagctgaagttagattcttgagacgacgacacagatttttaatgagaaccaattcatcagctccacaacaagtgaaattacataatgttgaaacaacccaatacagaaaaagcaagaaggacaaggttaatccgaaaaaggtggcgactttgcccaatttgcccccgattcccaaccaattccaaagggggaaaacgtattcgaagaagaaaaatatcgttccaagtcaaccacttcctgtgtttgacttggacaggaatgtaaatttgcaggggcacaactcgtttccggtgaaagaaagtggttttagtggtaaagcagctgtggttcaacctagagctcctatatttgacttgaaccagatatcagtagaagaagaagaattacaagagagctttgaggatcaaaagaaagaagtgcaaaatgatttaaagctatcaatttgtagaaatgtcggtgatggttcgacaaatagatccggaaagaggaaaatctcatggcaagatcctgtggctttaagagtatga

SEQ ID NO: 263 - protein, 234 aa, Tagetes erecta
MMSNKMKGVAFDSSSHGSFEDVRARFKHQTLVQDYLELQQETEAARNKLEAMKQKKHTLEAEVRFLRRRHRFLMRTNSSAPQQVKLHNVETTQYRKSKKDKVNPKKVATLPNLPPIPNQFQRGKTYSKKKNIVPSQPLPVFDLDRNVNLQGHNSFPVKESGFSGKAAVVQPRAPIFDLNQISVEEEELQESFEDQKKEVQNDLKLSICRNVGDGSTNRSGKRKISWQDPVALRV

SEQ ID NO: 264 - DNA, 732 bp, Zea mays
atggcggccaccaagaaaaccaagatcgtcttggcccagccggcggttggggctccgacgtcgcggctgccgttcttttctcgcgcgcccggcccggtccgaggcgccggggacgaggcggcgcacagggcgagcctcaggtaccggtccctcctccaggactaccaggagctcatcaaggaaacccaagcaaagaaggagaggctgtacatggagaggctcaggaagaagaggcttttggctgaagtcaaattcttgcgtaagagataccaatctatggctaagaacccctctcagacaattgcttgtagagtgaagaatccagcactgtcgtctgcatcctggagggctgcttcggtaagtgacgcccagcaccagttggttcgtgctgtcgggagctccagtagaaaccagctggtgcagccaaggcgcggtggttctccaagggtgtatccggcgattgacctcaatgaggcctgtgagccgggttatgagatggaaatcgtcgaagagcgccatggcaacagggcccctcttggcatcaacaagtcaaagaggtatccaatggaaagtgatgctgctgccggcaacaactcaaagaggtatcctatggagatgggaagtgatgttgttgccggcccaacccaggggaggatgcctgtgttctgggatgtccagaacccagcagggcgatctgggaagaggaagatctcatgtcaggatcaacgttag

SEQ ID NO: 265 - protein, 243 aa, Zea mays
MAATKKTKIVLAQPAVGAPTSRLPFFSRAPGPVRGAGDEAAHRASLRYRSLLQDYQELIKETQAKKERLYMERLRKKRLLAEVKFLRKRYQSMAKNPSQTIACRVKNPALSSASWRAASVSDAQHQLVRAVGSSSRNQLVQPRRGGSPRVYPAIDLNEACEPGYEMEIVEERHGNRAPLGINKSKRYPMESDAAAGNNSKRYPMEMGSDVVAGPTQGRMPVFWDVQNPAGRSGKRKISCQDQR

SEQ ID NO: 266 - DNA, 792 bp, Zea mays
atggacgatattgctggggagcgggggaggaaaggagacgactcttcccgtgccgtgctgacgccaccacgcggccccggtctcctctcgccctcctctccgtctagatctgatcctatcccctccccaccctccgccgccgtcctcgccctcccggccgcagccacgagcccgagcgccgggctcctggcctcgtctcgcctcaccggcgagatggacggcggcggggagacgctgctggtgcggaggagcaagggcaagaagaggcggcagccggcggcgcccgcggagaggggctccggcagcggggacaggttccgcgcgctctggcgggactaccacgacctgctgcaggagaccgaggcaaagaagaggaggctggcgagcaagaagcgaagaagcctcgccctgcttgctgaagtcaagttcttgcgaaggaagtatcagtcctttccgaagggtggctcgcagcagacacattacaggttgaagaagcaggctcggtacatgccatccccattgggccatggtgcagggaccgaagtgccttctaccagcagaaacccaaaccttgacttaaatcaagattctgtcctgaacgatgtggggaatgattgccaggggcaacatggccatccagaagttgaaaagttagatcaggtcgaggtgaatgaagatacgatgacacctgatgtcaaattatcagtttgtagggatacaggagagtactctcctgtaagtgaaggtaagagggcggttccatggcaagaccggttcgcgttgaagacctag

SEQ ID NO: 267 - protein, 263 aa, Zea mays
MDDIAGERGRKGDDSSRAVLTPPRGPGLLSPSSPSRSDPIPSPPSAAVLALPAAATSPSAGLLASSRLTGEMDGGGETLLVRRSKGKKRRQPAAPAERGSGSGDRFRALWRDYHDLLQETEAKKRRLASKKRRSLALLAEVKFLRRKYQSFPKGGSQQTHYRLKKQARYMPSPLGHGAGTEVPSTSRNPNLDLNQDSVLNDVGNDCQGQHGHPEVEKLDQVEVNEDTMTPDVKLSVCRDTGEYSPVSEGKRAVPWQDRFALKT

SEQ ID NO: 268 - DNA, 690 bp, Zea mays
atggcggccatcaagaagaccaagatcgtcttggcgcagccagcggttggggctcagccgtcgcggccgccgttcttttctcgcgcgcccggctcggtgcgaggcgccggggacgaggcggcttacagggccagcctcaggtaccgggccctccaccaggactaccaggacctcatcaaggaaatccaagcaaagaagaaaaggctgcacatgaagaggctcaagaagcagaggcttttggctgaagtcaagttcctgcggaagagatacaaatccatgtctgagaacccttctcagacaattgtctgtagagtgaggaatccagcaatgtcgtctgcatcctggacagctggttcggcaggtgatacctggcaccagtcggttcgtgctgccgggagctccagtagaagccagctggtgcagagaacacacggtggttctccaagggcatctccagtgattgacctcaatgaggcctgtgagccgggttatgaggagatggaaatcgaagggcaacatggttacatgtctcctctaggcgtaaacaagtcaaagaggtaccctatggaaggtgctgctgccagcccaagccagatgagaatgcatgtgttctgggatgtccagaatccagcagggcgatctggaaagaggaagatctcatggcaggatcagttggccctgagagtatag

SEQ ID NO: 269 - protein, 229 aa, Zea mays
MAAIKKTKIVLAQPAVGAQPSRPPFFSRAPGSVRGAGDEAAYRASLRYRALHQDYQDLIKEIQAKKKRLHMKRLKKQRLLAEVKFLRKRYKSMSENPSQTIVCRVRNPAMSSASWTAGSAGDTWHQSVRAAGSSSRSQLVQRTHGGSPRASPVIDLNEACEPGYEEMEIEGQHGYMSPLGVNKSKRYPMEGAAASPSQMRMHVFWDVQNPAGRSGKRKISWQDQLALRV

SEQ ID NO: 270 - DNA, 636 bp, Zingiber officinale
atggcgaaaggcggcaggcttccttcgaatgaagtcctccttgagcagctgagaaatggaactgctcagttcgagctcctcccgacgccggttcccctgtctgctcccgacgttcgattttttgctaggatcggttcctccttgggagggggtgtctcgccggcgacaaagaaagtagagcgctacgcagttcacaaaatcacaggcgacggtcggtgcatgttccgtgctctggtaaagggaatggcaaattacaaaggactggcacttagcttaagacaagaaaaggatgatgcagacgagttgcgtatggcagtcaaagagataatatgtgacaatgaaactgaacgacgccagtatgaagaagcacttatagcaatcactgtggatgaatcattgaaacaatactgtcaacgtattggacgatctgatttttggggaggagagtcagagctgttggtattgtccaaactgtgccggcaacccatcattgtttacatacctgagcatgaaggaatgccatcaactgaactgcattcgttgacacctcttcacaatttaccatgttgcaatattcaagaaattcttcaagcatacacatggaggatggggcagtggatttattcctatagctga

SEQ ID NO: 271 - protein, 211 aa, Zingiber officinale
MAKGGRLPSNEVLLEQLRNGTAQFELLPTPVPLSAPDVRFFARIGSSLGGGVSPATKKVERYAVHKITGDGRCMFRALVKGMANYKGLALSLRQEKDDADELRMAVKEIICDNETERRQYEEALIAITVDESLKQYCQRIGRSDFWGGESELLVLSKLCRQPIIVYIPEHEGMPSTELHSLTPLHNLPCCNIQEILQAYTWRMGQWIYSYS

SEQ ID NO: 272 - DNA, 549 bp, Zingiber officinale
atgaagaggggcgagaagttggccgtgcagtcttctccggcggccaaggcgcggttcaggcaccagagtctcttgcaggattatgaggatctggtgaaggaaactgacgcaaagagaaagaacctccacatagcgaagcagaagaaactcaaacttcatgctgaagtcaaattcttgcgaaaacgatacaaaactctattgcagaatcgatctggaacagtgcagtttaggctgaaaacgaaaccaaagagtcggttctttgttgctcaaccttcgaattcaaatgcttctcatcagctccctgctaaagatcaaagttcaaaattaagagatgatgcttctccaagcacttcagcaatcatagatttgaaccaggtctctttgccgattggtgaagacatggacaagtatcagtttgatgcagcgccttcaaaggttgaagctaccgatatcaagctctctatttgtcgagatgttggccatgcatcatcaaaccaagtggggaaaagaaagattacatggcaagatcaggtagctttgacagtgtag

SEQ ID NO: 273 - protein, 182 aa, Zingiber officinale
MKRGEKLAVQSSPAAKARFRHQSLLQDYEDLVKETDAKRKNLHIAKQKKLKLHAEVKFLRKRYKTLLQNRSGTVQFRLKTKPKSRFFVAQPSNSNASHQLPAKDQSSKLRDDASPSTSAIIDLNQVSLPIGEDMDKYQFDAAPSKVEATDIKLSICRDVGHASSNQVGKRKITWQDQVALTV

SEQ ID NO: 274 - DNA, 567 bp, Zingiber officinale
atgaggaaaggccagaagttgagcgaggaggtcaaggcaaggagcaggcatcagagtctcttgtgggattatggagatctggtcgaggaaactgaagcaaagaggaagaaactgcagatagctaatcagaagaagcttaaacttcttgctgaagtgaaattcttgcaaagacggtacaaaagcctatcccagaatccatctggaactaaacaattgaggctgaaaaagaaatcacagagtcagtccttgatcggccaaccttcaaatgcaaatgcatatcctcaactccctgctaaagaccaaagatcaaaactgagagatgctgatactccatgcacttctgccctgatagacctgaatcagattggtgaggatacagaggagtatccgtccagcttcagcgtcgagcctatgaagtctgataagttgaggaagagtttagtggaagacaattctgtggctaatgatctcaacctttcgatttgtcgtgatgttgtacatgaatcatcaaacaaggtggcaaagagaaagattacatggcaggatcagttagctttgagggtgtag

SEQ ID NO: 275 - protein, 188 aa, Zingiber officinale
MRKGQKLSEEVKARSRHQSLLWDYGDLVEETEAKRKKLQIANQKKLKLLAEVKFLQRRYKSLSQNPSGTKQLRLKKKSQSQSLIGQPSNANAYPQLPAKDQRSKLRDADTPCTSALIDLNQIGEDTEEYPSSFSVEPMKSDKLRKSLVEDNSVANDLNLSICRDVVHESSNKVAKRKITWQDQLALRV

SEQ ID NO: 276 - protein, 50 aa, Artificial sequence
  motif 1-4
  VARIANT (4)..(4): / replace = "Gly"
  misc_feature (6)..(7): Xaa can be any naturally occurring amino acid
  VARIANT (10)..(10): / replace = "Val"
  misc_feature (11)..(11): Xaa can be any naturally occurring amino acid
  VARIANT (12)..(12): / replace = "Ser"
  misc_feature (14)..(14): Xaa can be any naturally occurring amino acid
  VARIANT (15)..(15): / replace = "Pro"
  VARIANT (17)..(17): / replace = "Gln"
  misc_feature (18)..(18): Xaa can be any naturally occurring amino acid
  VARIANT (19)..(19): / replace = "Asn"
  VARIANT (21)..(21): / replace = "Pro"
  misc_feature (23)..(24): Xaa can be any naturally occurring amino acid
  misc_feature (26)..(26): Xaa can be any naturally occurring amino acid
  VARIANT (27)..(27): / replace = "Glu"
  VARIANT (28)..(28): / replace = "Glu"
  VARIANT (29)..(29): / replace = "Ala"
  VARIANT (30)..(30): / replace = "Glu"
  misc_feature (32)..(32): Xaa can be any naturally occurring amino acid
  VARIANT (34)..(34): / replace = "Glu"
  misc_feature (35)..(35): Xaa can be any naturally occurring amino acid
  VARIANT (36)..(36): / replace = "Ile"
  VARIANT (37)..(37): / replace = "Ala"
  VARIANT (38)..(38): / replace = "Pro"
  VARIANT (41)..(41): / replace = "Asn"
  VARIANT (44)..(44): / replace = "Ala"
  VARIANT (50)..(50): / replace = "Glu"
LNQDSXXNDEXNDXQGHXGHLEXXKXDQVGVXEDXMTADVKLSVCRDTGN

SEQ ID NO: 277 - protein, 50 aa, Artificial sequence
  motif 2-4
  VARIANT (2)..(2): / replace = "Arg"
  misc_feature (6)..(6): Xaa can be any naturally occurring amino acid
  VARIANT (8)..(8): / replace = "Val"
  VARIANT (9)..(9): / replace = "Val"
  VARIANT (10)..(10): / replace = "Lys"
  VARIANT (11)..(11): / replace = "Asp"
  VARIANT (12)..(12): / replace = "Asn"
  misc_feature (14)..(14): Xaa can be any naturally occurring amino acid
  VARIANT (16)..(16): / replace = "Arg"
  VARIANT (17)..(17): / replace = "Arg"
  misc_feature (18)..(18): Xaa can be any naturally occurring amino acid
  misc_feature (20)..(20): Xaa can be any naturally occurring amino acid
  misc_feature (22)..(22): Xaa can be any naturally occurring amino acid
  VARIANT (23)..(23): / replace = "Asn"
  VARIANT (24)..(24): / replace = "Lys"
  VARIANT (25)..(25): / replace = "Thr"
  VARIANT (26)..(26): / replace = "Ser"
  VARIANT (28)..(28): / replace = "Val"
  VARIANT (31)..(31): / replace = "Ser"
  VARIANT (37)..(37): / replace = "Gln"
  VARIANT (38)..(38): / replace = "Lys"
  VARIANT (40)..(40): / replace = "Leu"
  misc_feature (41)..(41): Xaa can be any naturally occurring amino acid
  VARIANT (44)..(44): / replace = "Lys" / replace = "Leu" / replace = "Pro"
  VARIANT (46)..(46): / replace = "Asn"
  VARIANT (47)..(47): / replace = "Asp" / replace = "Asn"
  VARIANT (50)..(50): / replace = "Lys"
LWRDYXDLLQETEXKKKXLXSXKRRKLALLAEVKFLRRKYXSFAKGGSQQ

SEQ ID NO: 278 - protein, 15 aa, Artificial sequence
  motif 3-4
  VARIANT (1)..(1): / replace = "Glu"
  VARIANT (2)..(2): / replace = "Gly"
  misc_feature (5)..(5): Xaa can be any naturally occurring amino acid
  VARIANT (6)..(6): / replace = "Ile"
  VARIANT (7)..(7): / replace = "Ser"
  VARIANT (11)..(11): / replace = "Gln"
  misc_feature (12)..(12): Xaa can be any naturally occurring amino acid
DDKRXVPWQDRXALK

SEQ ID NO: 279 - protein, 50 aa, Artificial sequence
  motif 4-4
  VARIANT (4)..(4): / replace = "Gly"
  VARIANT (6)..(6): / replace = "Ala" / replace = "Leu"
  VARIANT (7)..(7): / replace = "Met" / replace = "Pro" / replace = "Val"
  VARIANT (10)..(10): / replace = "Val"
  VARIANT (11)..(11): / replace = "Leu" / replace = "Arg" / replace = "Val"
  VARIANT (12)..(12): / replace = "Ser"
  VARIANT (14)..(14): / replace = "Phe" / replace = "His"
  VARIANT (15)..(15): / replace = "Pro"
  VARIANT (17)..(17): / replace = "Gln"
  VARIANT (18)..(18): / replace = "Gln" / replace = "Arg"
  VARIANT (19)..(19): / replace = "Asn"
  VARIANT (21)..(21): / replace = "Pro"
  VARIANT (23)..(23): / replace = "Leu" / replace = "Pro"
  VARIANT (24)..(24): / replace = "Asp" / replace = "Lys"
  VARIANT (26)..(26): / replace = "Ala" / replace = "Leu"
  VARIANT (27)..(27): / replace = "Glu"
  VARIANT (28)..(28): / replace = "Glu"
  VARIANT (29)..(29): / replace = "Ala"
  VARIANT (30)..(30): / replace = "Glu"
  VARIANT (32)..(32): / replace = "Glu" / replace = "Asn"
  VARIANT (34)..(34): / replace = "Glu"
  VARIANT (35)..(35): / replace = "Ile" / replace = "Met"
  VARIANT (36)..(36): / replace = "Ile"
  VARIANT (37)..(37): / replace = "Ala"
  VARIANT (38)..(38): / replace = "Pro"
  VARIANT (41)..(41): / replace = "Asn"
  VARIANT (44)..(44): / replace = "Ala"
  VARIANT (50)..(50): / replace = "Glu"
LNQDSVLNDEGNDCQGHHGHLEVEKFDQVGVDEDMMTADVKLSVCRDTGN

SEQ ID NO: 280 - protein, 50 aa, Artificial sequence
  motif 5-4
  VARIANT (2)..(2): / replace = "Arg"
  VARIANT (6)..(6): / replace = "Asn" / replace = "Arg"
  VARIANT (8)..(8): / replace = "Val"
  VARIANT (9)..(9): / replace = "Val"
  VARIANT (10)..(10): / replace = "Lys"
  VARIANT (11)..(11): / replace = "Asp"
  VARIANT (12)..(12): / replace = "Asn"
  VARIANT (14)..(14): / replace = "Gly" / replace = "Met"
  VARIANT (16)..(16): / replace = "Arg"
  VARIANT (17)..(17): / replace = "Arg"
  VARIANT (18)..(18): / replace = "Lys" / replace = "Met"
  VARIANT (20)..(20): / replace = "Glu" / replace = "Leu"
  VARIANT (22)..(22): / replace = "Ile" / replace = "Lys" / replace = "Thr"
  VARIANT (23)..(23): / replace = "Asn"
  VARIANT (24)..(24): / replace = "Lys"
  VARIANT (25)..(25): / replace = "Thr"
  VARIANT (26)..(26): / replace = "Ser"
  VARIANT (28)..(28): / replace = "Val"
  VARIANT (34)..(34): / replace = "Ser"
  VARIANT (37)..(37): / replace = "Gln"
  VARIANT (38)..(38): / replace = "Lys"
  VARIANT (40)..(40): / replace = "Leu"
  VARIANT (41)..(41): / replace = "Gly" / replace = "Asn"
  VARIANT (44)..(44): / replace = "Lys" / replace = "Leu" / replace = "Pro"
  VARIANT (46)..(46): / replace = "Asn"
  VARIANT (47)..(47): / replace = "Asp" / replace = "Asn"
  VARIANT (50)..(50): / replace = "Lys"
LWRDYHDLLQETEAKKKRLASAKRRKLALLAEVKFLRRKYQSFAKGGSQQ

SEQ ID NO: 281 - protein, 15 aa, Artificial sequence
  motif 6-4
  VARIANT (1)..(1): / replace = "Glu"
  VARIANT (2)..(2): / replace = "Gly"
  VARIANT (5)..(5): / replace = "Ser" / replace = "thr"
  VARIANT (6)..(6): / replace = "Ile"
  VARIANT (7)..(7): / replace = "Ser"
  VARIANT (11)..(11): / replace = "Gln"
  VARIANT (12)..(12): / replace = "Leu" / replace = "Met" / replace = "Val"
DDKRAVPWQDRFALK

SEQ ID NO: 282 - protein, 50 aa, Artificial sequence
  motif 7-4
  VARIANT (3)..(3): / replace = "Leu"
  VARIANT (4)..(4): / replace = "Lys"
  VARIANT (5)..(5): / replace = "Tyr"
  VARIANT (7)..(7): / replace = "Thr"
  VARIANT (13)..(13): / replace = "Leu"
  VARIANT (14)..(14): / replace = "Asp"
  VARIANT (17)..(17): / replace = "Gln"
  VARIANT (22)..(22): / replace = "Met"
  VARIANT (23)..(23): / replace = "Lys"
  VARIANT (24)..(24): / replace = "Arg" / replace = "Asn"
  VARIANT (25)..(25): / replace = "Arg"
  VARIANT (27)..(27): / replace = "Gln"
  VARIANT (28)..(28): / replace = "Ala"
  VARIANT (29)..(29): / replace = "Ala"
  VARIANT (31)..(31): / replace = "Leu"
  VARIANT (32)..(32): / replace = "Arg"
  VARIANT (34)..(34): / replace = "Gln"
  VARIANT (35)..(35): / replace = "Arg"
  VARIANT (37)..(37): / replace = "Glu"
  VARIANT (41)..(41): / replace = "Lys"
  VARIANT (45)..(45): / replace = "Lys"
  VARIANT (47)..(47): / replace = "His"
  VARIANT (49)..(49): / replace = "Tyr" / replace = "Phe"
ARFRHQSLLQDYEELQKETEAKRKKLEMMKQKKLTLLAEVRFLRRRYKSL

SEQ ID NO: 283 - protein, 21 aa, Artificial sequence
  motif 8-4
  VARIANT (2)..(2): / replace = "Gly"
  VARIANT (3)..(3): / replace = "Pro" / replace = "Thr"
  VARIANT (4)..(4): / replace = "Ser"
  VARIANT (12)..(12): / replace = "Thr"
  VARIANT (16)..(16): / replace = "Pro"
  VARIANT (17)..(17): / replace = "Leu"
NSSNRAGKRKISWQDQVALRV

SEQ ID NO: 284 - protein, 21 aa, Artificial sequence
  motif 9-4
  VARIANT (1)..(1): / replace = "Ser"
  VARIANT (2)..(2): / replace = "Gln"
  VARIANT (5)..(5): / replace = "Ser" / replace = "Thr"
  VARIANT (7)..(7): / replace = "Val"
  VARIANT (8)..(8): / replace = "Ile"
  VARIANT (12)..(12): / replace = "Glu"
  VARIANT (15)..(15): / replace = "Glu"
  VARIANT (16)..(16): / replace = "Pro"
  VARIANT (18)..(18): / replace = "Asp"
  VARIANT (20)..(20): / replace = "Glu"
  VARIANT (21)..(21): / replace = "Glu"
VPSRAPIFDLNQISREEEELQ

SEQ ID NO: 285 - DNA, 2194 bp, Oryza sativa; identical to SEQ ID NO: 46

SEQ ID NO: 286 - DNA, 14322 bp, Artificial sequence
  expression cassette
agcttagcttgagcttggatcagattgtcgtttcccgccttcagtttaaactatcagtgtttgacaggatatattggcgggtaaacctaagagaaaagagcgtttattagaataatcggatatttaaaagggcgtgaaaaggtttatccgttcgtccatttgtatgtgcatgccaaccacagggttcccctcgggatcaaagtatgaagagatcgaggcggagatgatcgcggccgggtacgtgttcgagccgcccgcgcacgtctcaaccgtgcggctgcatgaaatcctggccggtttgtctgatgccaagctggcggcctggccggccagcttggccgctgaagaaaccgagcgccgccgtctaaaaaggtgatgtgtatttgagtaaaacagcttgcgtcatgcggtcgctgcgtatatgatgcgatgagtaaataaacaaatacgcaaggggaacgcatgaaggttatcgctgtacttaaccagaaaggcgggtcaggcaagacgaccatcgcaacccatctagcccgcgccctgcaactcgccggggccgatgttctgttagtcgattccgatccccagggcagtgcccgcgattgggcggccgtgcgggaagatcaaccgctaaccgttgtcggcatcgaccgcccgacgattgaccgcgacgtgaaggccatcggccggcgcgacttcgtagtgatcgacggagcgccccaggcggcggacttggctgtgtccgcgatcaaggcagccgacttcgtgctgattccggtgcagccaagcccttacgacatatgggccaccgccgacctggtggagctggttaagcagcgcattgaggtcacggatggaaggctacaagcggcctttgtcgtgtcgcgggcgatcaaaggcacgcgcatcggcggtgaggttgccgaggcgctggccgggtacgagctgcccattcttgagtcccgtatcacgcagcgcgtgagctacccaggcactgccgccgccggcacaaccgttcttgaatcagaacccgagggcgacgctgcccgcgaggtccaggcgctggccgctgaaattaaatcaaaactcatttgagttaatgaggtaaagagaaaatgagcaaaagcacaaacacgctaagtgccggccgtccgagcgcacgcagcagcaaggctgcaacgttggccagcctggcagacacgccagccatgaagcgggtcaactttcagttgccggcggaggatcacaccaagctgaagatgtacgcggtacgccaaggcaagaccattaccgagctgctatctgaatacatcgcgcagctaccagagtaaatgagcaaatgaataaatgagtagatgaattttagcggctaaaggaggcggcatggaaaatcaagaacaaccaggcaccgacgccgtggaatgccccatgtgtggaggaacgggcggttggccaggcgtaagcggctgggttgtctgccggccctgcaatggcactggaacccccaagcccgaggaatcggcgtgagcggtcgcaaaccatccggcccggtacaaatcggcgcggcgctgggtgatgacctggtggagaagttgaaggccgcgcaggccgcccagcggcaacgcatcgaggcagaagcacgccccggtgaatcgtggcaagcggccgctgatcgaatccgcaaagaatcccggcaaccgccggcagccggtgcgccgtcgattaggaagccgcccaagggcgacgagcaaccagattttttcgttccgatgctctatgacgtgggcacccgcgatagtcgcagcatcatggacgtggccgttttccgtctgtcgaagcgtgaccgacgagctggcgaggtgatccgctacgagcttccagacgggcacgtagaggtttccgcagggccggccggcatggccagtgtgtgggattacgacctggtactgatggcggtttcccatctaaccgaatccatgaaccgataccgggaagggaagggagacaagcccggccgcgtgttccgtccacacgttgcggacgtactcaagttctgccggcgagccgatggcggaaagcagaaagacgacctggtagaaacctgcattcggttaaacaccacgcacgttgccatgcagcgtacgaagaaggccaagaacggccgcctggtgacggtatccgagggtgaagccttgattagccgctacaagatcgtaaagagcgaaaccgggcggccggagtacatcgagatcgagctagctgattggatgtaccgcgagatcacagaaggcaagaacccggacgtgctgacggttcaccccgattactttttgatcgatcccggcatcggccgttttctctaccgcctggcacgccgcgccgcaggcaaggcagaagccagatggttgttcaagacgatctacgaacgcagtggcagcgccggagagttcaagaagttctgtttcaccgtgcgcaagctgatcgggtcaaatgacctgccggagtacgatttgaaggaggaggcggggcaggctggcccgatcctagtcatgcgctaccgcaacctgatcgagggcgaagcatccgccggttcctaatgtacggagcagatgctagggcaaattgccctagcaggggaaaaaggtcgaaaaggtctctttcctgtggatagcacgtacattgggaacccaaagccgtacattgggaaccggaacccgtacattgggaacccaaagccgtacattgggaaccggtcacacatgtaagtgactgatataaaagagaaaaaaggcgatttttccgcctaaaactctttaaaacttattaaaactcttaaaacccgcctggcctgtgcataactgtctggccagcgcacagccgaagagctgcaaaaagcgcctacccttcggtcgctgcgctccctacgccccgccgcttcgcgtcggcctatcgcggccgctggccgctcaaaaatggctggcctacggccaggcaatctaccagggcgcggacaagccgcgccgtcgccactcgaccgccggcgcccacatcaaggcaccctgcctcgcgcgtttcggtgatgacggtgaaaacctctgacacatgcagctcccggagacggtcacagcttgtctgtaagcggatgccgggagcagacaagcccgtcagggcgcgtcagcgggtgttggcgggtgtcggggcgcagccatgacccagtcacgtagcgatagcggagtgtatactggcttaactatgcggcatcagagcagattgtactgagagtgcaccatatgcggtgtgaaataccgcacagatgcgtaaggagaaaataccgcatcaggcgctcttccgcttcctcgctcactgactcgctgcgctcggtcgttcggctgcggcgagcggtatcagctcactcaaaggcggtaatacggttatccacagaatcaggggataacgcaggaaagaacatgtgagcaaaaggccagcaaaaggccaggaaccgtaaaaaggccgcgttgctggcgtttttccataggctccgcccccctgacgagcatcacaaaaatcgacgctcaagtcagaggtggcgaaacccgacaggactataaagataccaggcgtttccccctggaagctccctcgtgcgctctcctgttccgaccctgccgcttaccggatacctgtccgcctttctcccttcgggaagcgtggcgctttctcatagctcacgctgtaggtatctcagttcggtgtaggtcgttcgctccaagctgggctgtgtgcacgaaccccccgttcagcccgaccgctgcgccttatccggtaactatcgtcttgagtccaacccggtaagacacgacttatcgccactggcagcagccactggtaacaggattagcagagcgaggtatgtaggcggtgctacagagttcttgaagtggtggcctaactacggctacactagaaggacagtatttggtatctgcgctctgctgaagccagttaccttcggaaaaagagttggtagctcttgatccggcaaacaaaccaccgctggtagcggtggtttttttgtttgcaagcagcagattacgcgcagaaaaaaaggatctcaagaagatcctttgatcttttctacggggtctgacgcttagtggaacgaaaactcacgttaagggattttggtcatgcatgatatatctcccaatttgtgtagggcttattatgcacgcttaaaaataataaaagcagacttgacctgatagtttggctgtgagcaattatgtgcttagtgcatctaacgcttgagttaagccgcgccgcgaagcggcgtcggcttgaacgaatttctagctagacattatttgccgactaccttggtgatctcgcctttcacgtagtggacaaattcttccaactgatctgcgcgcgaggccaagcgatcttcttcttgtccaagataagcctgtctagcttcaagtatgacgggctgatactgggccggcaggcgctccattgcccagtcggcagcgacatccttcggcgcgattttgccggttactgcgctgtaccaaatgcgggacaacgtaagcactacatttcgctcatcgccagcccagtcgggcggcgagttccatagcgttaaggtttcatttagcgcctcaaatagatcctgttcaggaaccggatcaaagagttcctccgccgctggacctaccaaggcaacgctatgttctcttgcttttgtcagcaagatagccagatcaatgtcgatcgtggctggctcgaagatacctgcaagaatgtcattgcgctgccattctccaaattgcagttcgcgcttagctggataacgccacggaatgatgtcgtcgtgcacaacaatggtgacttctacagcgcggagaatctcgctctctccaggggaagccgaagtttccaaaaggtcgttgatcaaagctcgccgcgttgtttcatcaagccttacggtcaccgtaaccagcaaatcaatatcactgtgtggcttcaggccgccatccactgcggagccgtacaaatgtacggccagcaacgtcggttcgagatggcgctcgatgacgccaactacctctgatagttgagtcgatacttcggcgatcaccgcttcccccatgatgtttaactttgttttagggcgactgccctgctgcgtaacatcgttgctgctccataacatcaaacatcgacccacggcgtaacgcgcttgctgcttggatgcccgaggcatagactgtaccccaaaaaaacagtcataacaagccatgaaaaccgccactgcgccgttaccaccgctgcgttcggtcaaggttctggaccagttgcgtgagcgcatacgctacttgcattacagcttacgaaccgaacaggcttatgtccactgggttcgtgcccgaattgatcacaggcagcaacgctctgtcatcgttacaatcaacatgctaccctccgcgagatcatccgtgtttcaaacccggcagcttagttgccgttcttccgaatagcatcggtaacatgagcaaagtctgccgccttacaacggctctcccgctgacgccgtcccggactgatgggctgcctgtatcgagtggtgattttgtgccgagctgccggtcggggagctgttggctggctggtggcaggatatattgtggtgtaaacaaattgacgcttagacaacttaataacacattgcggacgtttttaatgtactgaattaacgccgaattgaattcaagagctcaaggatcctaactataacggtcctaaggtagcgaaggcgcgccgaattcgaggggatcgagcccctgctgagcctcgacatgttgtcgcaaaattcgccctggacccgcccaacgatttgtcgtcactgtcaaggtttgacctgcacttcatttggggcccacatacaccaaaaaaatgctgcataattctcggggcagcaagtcggttacccggccgccgtgctggaccgggttgaatggtgcccgtaactttcggtagagcggacggccaatactcaacttcaaggaatctcacccatgcgcgccggcggggaaccggagttcccttcagtgagcgttattagttcgccgctcggtgtgtcgtagatactagcccctggggcacttttgaaatttgaataagatttatgtaatcagtcttttaggtttgaccggttctgccgctttttttaaaattggatttgtaataataaaacgcaattgtttgttattgtggcgctctatcatagatgtcgctataaacctattcagcacaatatattgttttcattttaatattgtacatataagtagtagggtacaatcagtaaattgaacggagaatattattcataaaaatacgatagtaacgggtgatatattcattagaatgaaccgaaaccggcggtaaggatctgagctacacatgctcaggttttttacaacgtgcacaacagaattgaaagcaaatatcatgcgatcataggcgtctcgcatatctcattaaagcagggggtgggcgaagaactccagcatgagatccccgcgctggaggatcatccagccggcgtcccggaaaacgattccgaagcccaacctttcatagaaggcggcggtggaatcgaaatctcgtgatggcaggttgggcgtcgcttggtcggtcatttcgaaccccagagtcccgctcagaagaactcgtcaagaaggcgatagaaggcgatgcgctgcgaatcgggagcggcgataccgtaaagcacgaggaagcggtcagcccattcgccgccaagctcttcagcaatatcacgggtagccaacgctatgtcctgatagcggtccgccacacccagccggccacagtcgatgaatccagaaaagcggccattttccaccatgatattcggcaagcaggcatcgccatgggtcacgacgagatcctcgccgtcgggcatgcgcgccttgagcctggcgaacagttcggctggcgcgagcccctgatgctcttcgtccagatcatcctgatcgacaagaccggcttccatccgagtacgtgctcgctcgatgcgatgtttcgcttggtggtcgaatgggcaggtagccggatcaagcgtatgcagccgccgcattgcatcagccatgatggatactttctcggcaggagcaaggtgagatgacaggagatcctgccccggcacttcgcccaatagcagccagtcccttcccgcttcagtgacaacgtcgagcacagctgcgcaaggaacgcccgtcgtggccagccacgatagccgcgctgcctcgtcctgcagttcattcagggcaccggacaggtcggtcttgacaaaaagaaccgggcgcccctgcgctgacagccggaacacggcggcatcagagcagccgattgtctgttgtgcccagtcatagccgaatagcctctccacccaagcggccggagaacctgcgtgcaatccatcttgttcaatccacatgatcaaacgttttgaggacgcgagaggattcgattcgacgacgagagcctcgcgagattggggagaaatttttcgggggtggagctgatgcgaggagaggagatgagggggctggtatttatggcggttgggtggtgggaggagtcccgtgccgtgacgtctccgtctgcttggagaatccgccacgctgaaaccaccgcggtttccgggaagacgaggcgggcgagcgagcggttgggaaatttcgagaagatgccgtttgtctccgtttggtacacgtctcgttgatttttttttagtgaattacgctttggaccacattttattatctaagggtgtgtttggttgtaagccacactttgccacagtttgccacgcctaaggttaggcaaatttgacaggtgtttggttgtagccacagttgtggcaagatttccctctaacaaattaagtcccacgtgtcaatggctcaaaaaagtgtggcaagattcccttaggcttagtaagttgtggctaacaatttgatcacctcaccttagacaaggtgtggcaacttttgttggcaagtaatggtaaagtatggctgggaaccaaacagcccctaagttttactttggactacctttaaacatatcttttcactttgaactagataaatttgctattgttgcgatttggattttttttttctcgtgcaatcaacgaccttaaacacatcagctctagtatacggccgatctcctctatatatggttcatatgtttgccgaaagggaagttagacatgacgaaaagttgttcatggtagtccaaaccacaacccggcccaatttgaaaagataggtttaagggtggtccaaattgaaacttgggtaataaaaggtggatcaaagtgcaatttacttttttttactgtaatttcttctggctggtttgttggtcgccgttaggaccgggtgacgccgtcaaccccgcgcctccgtattcgctgacgtggggtggcgcgctggcttccgccttgacccgaatttgttttccttccgttaaaaaaatggttttccttttcttaaaaaggaaatagtttgttttttaagtctgtgtattaggattattacacttgaattttggtatatgtgtaggataatttactgcatgtttataatagagttgtactatagatgaaataacccaatttttggtataattcgtgtttggttggaggtcaaaataacaggttattttgtgaagaaaaaactccgtagtatagtaccatatccatcatgaatacacatactgcctagacgagtgattaggatgaatccatgttatattcctcaaaataatataaaccacttgatcttatgatcttatccaatctgttcatataaactggagatataagatggtgcatttcccttttgatttcttttgttgacggccatgagataggttgcatccactgcatttatattttggaccaatacaatgcacctattgatacatggggacagctcaactaaccatgatgcaaaatgctggttggtgaccagttcttggcattatgataatgataggattaaaaaaaacagtgcaatgtctcggaaagaaaccatgacaaagggtacatgttgcattccagtttctaatgataaaattatgtgccagcaattcaaaaatcatgcgtgttccctacgcaccattctttgcaataaacaagtgcatgcacaatatgattgtgctaaggttcaagaacttgttgcagtggctaagcttggcgcgcctcgcgaccacctttaattaagtgaagagcaggagcttgcatgcctgcaggctctagaggatcccccctcagaagaccagagggctattgagacttttcaacaaagggtaatatcgggaaacctcctcggattccattgcccagctatctgtcacttcatcgaaaggacagtagaaaaggaaggtggctcctacaaatgccatcattgcgataaaggaaaggctatcgttcaagatgcctctaccgacagtggtcccaaagatggacccccacccacgaggaacatcgtggaaaaagaagacgttccaaccacgtcttcaaagcaagtggattgatgtgatatctccactgacgtaagggatgacgcacaatcccactatccttcgcaagacccttcctctatataaggaagttcatttcatttggagaggacaggcttcttgagatccttcaacaattaccaacaacaacaaacaacaaacaacattacaattactatttacaattacagtcgactctagaggatccatggtgagcaagggcgaggagctgttcaccggggtggtgcccatcctggtcgagctggacggcgacgtaaacggccacaagttcagcgtgtccggcgagggcgagggcgatgccacctacggcaagctgaccctgaagttcatctgcaccaccggcaagctgcccgtgccctggcccaccctcgtgaccaccttcacctacggcgtgcagtgcttcagccgctaccccgaccacatgaagcagcacgacttcttcaagtccgccatgcccgaaggctacgtccaggagcgcaccatcttcttcaaggacgacggcaactacaagacccgcgccgaggtgaagttcgagggcgacaccctggtgaaccgcatcgagctgaagggcatcgacttcaaggaggacggcaacatcctggggcacaagctggagtacaactacaacagccacaacgtctatatcatggccgacaagcagaagaacggcatcaaggtgaacttcaagatccgccacaacatcgaggacggcagcgtgcagctcgccgaccactaccagcagaacacccccatcggcgacggccccgtgctgctgcccgacaaccactacctgagcacccagtccgccctgagcaaagaccccaacgagaagcgcgatcacatggtcctgctggagttcgtgaccgccgccgggatcactcacggcatggacgagctgtacaagtaaagcggccgcccggctgcagatcgttcaaacatttggcaataaagtttcttaagattgaatcctgttgccggtcttgcgatgattatcatataatttctgttgaattacgttaagcatgtaataattaacatgtaatgcatgacgttatttatgagatgggtttttatgattagagtcccgcaattatacatttaatacgcgatagaaaacaaaatatagcgcgcaaactaggataaattatcgcgcgcggtgtcatctatgttactagatccgatgataagctgtcaaacatgagaattcctttcgtcgacccacgtgttgctgaggtatttaaataatccgaaaagtttctgcaccgttttcaccccctaactaacaatatagggaacgtgtgctaaatataaaatgagaccttatatatgtagcgctgataactagaactatgcaagaaaaactcatccacctactttagtggcaatcgggctaaataaaaaagagtcgctacactagtttcgttttccttagtaattaagtgggaaaatgaaatcattattgcttagaatatacgttcacatctctgtcatgaagttaaattattcgaggtagccataattgtcatcaaactcttcttgaataaaaaaatctttctagctgaactcaatgggtaaagagagagattttttttaaaaaaatagaatgaagatattctgaacgtattggcaaagatttaaacatataattatataattttatagtttgtgcattcgtcatatcgcacatcattaaggacatgtcttactccatcccaatttttatttagtaattaaagacaattgacttatttttattatttatcttttttcgattagatgcaaggtacttacgcacacactttgtgctcatgtgcatgtgtgagtgcacctcctcaatacacgttcaactagcaacacatctctaatatcactcgcctatttaatacatttaggtagcaatatctgaattcaagcactccaccatcaccagaccacttttaataatatctaaaatacaaaaaataattttacagaatagcatgaaaagtatgaaacgaactatttaggtttttcacatacaaaaaaaaaaagaattttgctcgtgcgcgagcgccaatctcccatattgggcacacaggcaacaacagagtggctgcccacagaacaacccacaaaaaacgatgatctaacggaggacagcaagtccgcaacaaccttttaacagcaggctttgcggccaggagagaggaggagaggcaaagaaaaccaagcatcctccttctcccatctataaattcctccccccttttcccctctctatataggaggcatccaagccaagaagagggagagcaccaaggacacgcgactagcagaagccgagcgaccgccttctcgatccatatcttccggtcgagttcttggtcgatctcttccctcctccacctcctcctcacagggtatgtgcctcccttcggttgttcttggatttattgttctaggttgtgtagtacgggcgttgatgttaggaaaggggatctgtatctgtgatgattcctgttcttggatttgggatagaggggttcttgatgttgcatgttatcggttcggtttgattagtagtatggttttcaatcgtctggagagctctatggaaatgaaatggtttagggatcggaatcttgcgattttgtgagtaccttttgtttgaggtaaaatcagagcaccggtgattttgcttggtgtaataaagtacggttgtttggtcctcgattctggtagtgatgcttctcgatttgacgaagctatcctttgtttattccctattgaacaaaaataatccaactttgaagacggtcccgttgatgagattgaatgattgattcttaagcctgtccaaaatttcgcagctggcttgtttagatacagtagtccccatcacgaaattcatggaaacagttataatcctcaggaacaggggattccctgttcttccgatttgctttagtcccagaattttttttcccaaatatcttaaaaagtcactttctggttcagttcaatgaattgattgctacaaataatgcttttatagcgttatcctagctgtagttcagttaataggtaatacccctatagtttagtcaggagaagaacttatccgatttctgatctccatttttaattatatgaaatgaactgtagcataagcagtattcatttggattattttttttattagctctcaccccttcattattctgagctgaaagtctggcatgaactgtcctcaattttgttttcaaattcacatcgattatctatgcattatcctcttgtatctacctgtagaagtttctttttggttattccttgactgcttgattacagaaagaaatttatgaagctgtaatcgggatagttatactgcttgttcttatgattcatttcctttgtgcagttcttggtgtagcttgccactttcaccagcaaagttcatttaaatcaactagggatatcacaagtttgtacaaaaaagcaggcttaaacaatggactacggcgacggggaggtgcggctggtgaggaggaaggggaagaagaggctcgctccgcctccgcctccgcctccggcggcggaggggggcgagagggacaggttggacgagctccggcgggactaccgcgatgtgctcaaggataatgagatgaagaggaggaagctagagagcataaacaagcgaaagctcgtcctgctttctgaagtcaagttcttacaaaagaagttaaattctttcaagaagaatgattcgcagcaagtacggctgaagaagaaagctccgcgagtcccatctcatgtgggaatcaatgatgcttcagctttttatggggcgagtactgaagtgccatctaccagtaaaagaacagatttagatttaaatcaagattctgcaatgaatgatgagctttctgatttcccggggcaccataaccatttggaacttaaaaaggctgaacaggctggagtagatgaagatattatgactgccgatgtcaacctatcagcttgtagggataccggaaactctccggcaagcgatgataagaggagtgtttcatggcaagaccgtgtagcgttgaaggtctagtccttccatagatgtggctatgaaataacatccttacccagctttcttgtacaaagtggtgatatcacaagcccgggcggtcttctagggataacagggtaattatatccctctagatcacaagcccgggcggtcttctacgatgattgagtaataatgtgtcacgcatcaccatgggtggcagtgtcagtgtgagcaatgacctgaatgaacaattgaaatgaaaagaaaaaaagtactccatctgttccaaattaaaattggttttaaccttttaataggtttatacaataattgatatatgttttctgtatatgtctaatttgttatcatccgggcggtcttctagggataacagggtaattatatccctctagacaacacacaacaaataagagaaaaaacaaataatattaatttgagaatgaacaaaaggaccatatcattcattaactcttctccatccacttccatttcacagttcgatagcgaaaaccgaataaaaaacacagtaaattacaagcacaacaaatggtacaagaaaaacagttttcccaatgccataatactcgactcgagttcctgcaggtaccaaa

SEQ ID NO: 287 - DNA, 51 bp, Artificial sequence
  sense primer
ggggacaagtttgtacaaaaaagcaggcttaaacaatggactacggcgacg

SEQ ID NO: 288 - DNA, 50 bp, Artificial sequence
  reverse primer
ggggaccactttgtacaagaaagctgggtaaggatgttatttcatagcca

SEQ ID NO: 289 - protein, 50 aa, Artificial sequence
  motif 1-4
  VARIANT (4)..(4): wherein Xaa may be Gly or Asp
  misc_feature (6)..(7): Xaa can be any naturally occurring amino acid
  VARIANT (10)..(10): wherein Xaa may be Val or Glu
  misc_feature (11)..(11): Xaa can be any naturally occurring amino acid
  VARIANT (12)..(12): wherein Xaa may be Ser or Asn
  misc_feature (14)..(14): Xaa can be any naturally occurring amino acid
  VARIANT (15)..(15): wherein Xaa may be Pro or Gln
  VARIANT (17)..(17): wherein Xaa may be Gln or His
  misc_feature (18)..(18): Xaa can be any naturally occurring amino acid
  VARIANT (19)..(19): wherein Xaa may be Asn or Gly
  VARIANT (21)..(21): wherein Xaa may be Pro or Leu
  misc_feature (23)..(24): Xaa can be any naturally occurring amino acid
  misc_feature (26)..(26): Xaa can be any naturally occurring amino acid
  VARIANT (27)..(27): wherein Xaa may be Glu or Asp
  VARIANT (28)..(28): wherein Xaa may be Glu or Gln
  VARIANT (29)..(29): wherein Xaa may be Ala or Val
  VARIANT (30)..(30): wherein Xaa may be Glu or Gly
  misc_feature (32)..(32): Xaa can be any naturally occurring amino acid
  VARIANT (34)..(34): wherein Xaa may be Glu or Asp
  misc_feature (35)..(35): Xaa can be any naturally occurring amino acid
  VARIANT (36)..(36): wherein Xaa may be Ile or Met
  VARIANT (37)..(37): wherein Xaa may be Ala or Thr
  VARIANT (38)..(38): wherein Xaa may be Pro or Ala
  VARIANT (41)..(41): wherein Xaa may be Asn or Lys
  VARIANT (44)..(44): wherein Xaa may be Ala or Val
  VARIANT (50)..(50): wherein Xaa may be Glu or Asn
LNQXSXXNDXXXDXXGXXXHXEXXKXXXXXVXEXXXXXDVXLSXCRDTGX

SEQ ID NO: 290 - protein, 50 aa, Artificial sequence
  motif 2-4
  VARIANT (2)..(2): wherein Xaa can be Arg or Trp
  misc_feature (6)..(6): Xaa can be any naturally occurring amino acid
  VARIANT (8)..(8): wherein Xaa can be Val or Leu
  VARIANT (9)..(9): wherein Xaa can be Val or Leu
  VARIANT (10)..(10): wherein Xaa can be Lys or Gln
  VARIANT (11)..(11): wherein Xaa can be Asp or Glu
  VARIANT (12)..(12): wherein Xaa can be Asn or Thr
  misc_feature (14)..(14): Xaa can be any naturally occurring amino acid
  VARIANT (16)..(16): wherein Xaa can be Arg or Lys
  VARIANT (17)..(17): wherein Xaa can be Arg or Lys
  misc_feature (18)..(18): Xaa can be any naturally occurring amino acid
  misc_feature (20)..(20): Xaa can be any naturally occurring amino acid
  misc_feature (22)..(22): Xaa can be any naturally occurring amino acid
  VARIANT (23)..(23): wherein Xaa can be Asn or Lys
  VARIANT (24)..(24): wherein Xaa can be Lys or Arg
  VARIANT (25)..(25): wherein Xaa can be Thr or Arg
  VARIANT (26)..(26): wherein Xaa can be Ser or Lys
  VARIANT (28)..(28): wherein Xaa can be Val or Ala
  VARIANT (31)..(31): wherein Xaa can be Ser or Ala
  VARIANT (37)..(37): wherein Xaa can be Gln or Arg
  VARIANT (38)..(38): wherein Xaa can be Lys or Arg
  VARIANT (40)..(40): wherein Xaa can be Leu or Tyr
  misc_feature (41)..(41): Xaa can be any naturally occurring amino acid
  VARIANT (44)..(44): wherein Xaa can be Lys, Leu, Pro or Ala
  VARIANT (46)..(46): wherein Xaa can be Asn or Gly
  VARIANT (47)..(47): wherein Xaa can be Asp, Asn or Gly
  VARIANT (50)..(50): wherein Xaa can be Lys or Gln
LXRDYXDXXXXXEXKXXXLXSXXXXXLXLLXEVKFLXXKXXSFXKXXSQX

SEQ ID NO: 291 - protein, 15 aa, Artificial sequence
  motif 3-4
  VARIANT (1)..(1): wherein Xaa can be Glu or Asp
  VARIANT (2)..(2): wherein Xaa can be Gly or Asp
  misc_feature (5)..(5): Xaa can be any naturally occurring amino acid
  VARIANT (6)..(6): wherein Xaa can be Ile or Val
  VARIANT (7)..(7): wherein Xaa can be Ser or Pro
  VARIANT (11)..(11): wherein Xaa can be Gln or Arg
  misc_feature (12)..(12): Xaa can be any naturally occurring amino acid
XXKRXXXWQDXXALK

SEQ ID NO: 292 - protein, 50 aa, Artificial sequence; identical to SEQ ID NO: 289
  motif 4-4
  VARIANT (4)..(4): wherein Xaa may be Gly or Asp
  VARIANT (6)..(6): wherein Xaa can be Ala, Leu or Val
  VARIANT (7)..(7): wherein Xaa can be Met, Pro, Val, or Leu
  VARIANT (10)..(10): wherein Xaa may be Val or Glu
  VARIANT (11)..(11): wherein Xaa be Leu, Arg, Val or Gly
  VARIANT (12)..(12): wherein Xaa may be Ser or Asn
  VARIANT (14)..(14): wherein Xaa may Phe, His or Cys
  VARIANT (15)..(15): wherein Xaa may be Pro or Gln
  VARIANT (17)..(17): wherein Xaa may be Gln or His
  VARIANT (18)..(18): wherein Xaa may Gln, Arg or His
  VARIANT (19)..(19): wherein Xaa may be Asn or Gly
  VARIANT (21)..(21): wherein Xaa may be Pro or Leu
  VARIANT (23)..(23): wherein Xaa may be Leu, Pro, or Val
  VARIANT (24)..(24): wherein Xaa may be Asp, Lys, or Glu
  VARIANT (26)..(26): wherein Xaa may be Ala, Leu or Asp
  VARIANT (27)..(27): wherein Xaa may be Glu or Asp
  VARIANT (28)..(28): wherein Xaa may be Glu or Gln
  VARIANT (29)..(29): wherein Xaa may be Ala or Val
  VARIANT (30)..(30): wherein Xaa may be Glu or Gly
  VARIANT (32)..(32): wherein Xaa  may be Glu, Asn or Asp
  VARIANT (34)..(34): wherein Xaa may be Glu or Asp
  VARIANT (35)..(35): wherein Xaa may be Ile, Met or Thr
  VARIANT (36)..(36): wherein Xaa may be Ile or Met
  VARIANT (37)..(37): wherein Xaa may be Ala or Thr
  VARIANT (38)..(38): wherein Xaa may be Pro or Ala
  VARIANT (41)..(41): wherein Xaa may be Asn or Lys
  VARIANT (44)..(44): wherein Xaa may be Ala or Val
  VARIANT (50)..(50): wherein Xaa may be Glu or Asn

SEQ ID NO: 293 - protein, 50 aa, Artificial sequence; identical to SEQ ID NO: 290
  motif 5-4
  VARIANT (2)..(2): wherein Xaa can be Arg or Trp
  VARIANT (6)..(6): wherein Xaa can be Asn, Arg or His
  VARIANT (8)..(8): wherein Xaa can be Val or Leu
  VARIANT (9)..(9): wherein Xaa can be Val or Leu
  VARIANT (10)..(10): wherein Xaa can be Lys or Gln
  VARIANT (11)..(11): wherein Xaa can be Asp or Glu
  VARIANT (12)..(12): wherein Xaa can be Asn or Thr
  VARIANT (14)..(14): wherein Xaa can be Gly, Met or Ala
  VARIANT (16)..(16): wherein Xaa can be Arg or Lys
  VARIANT (17)..(17): wherein Xaa can be Arg or Lys
  VARIANT (18)..(18): wherein Xaa can be Lys, Met or Arg
  VARIANT (20)..(20): wherein Xaa can be Glu, Leu, or Ala
  VARIANT (22)..(22): wherein Xaa can be Lys, Thr, or Ala
  VARIANT (23)..(23): wherein Xaa can be Asn or Lys
  VARIANT (24)..(24): wherein Xaa can be Lys or Arg
  VARIANT (25)..(25): wherein Xaa can be Thr or Arg
  VARIANT (26)..(26): wherein Xaa can be Ser or Lys
  VARIANT (28)..(28): wherein Xaa can be Val or Ala
  VARIANT (31)..(31): wherein Xaa can be Ser or Ala
  VARIANT (37)..(37): wherein Xaa can be Gln or Arg
  VARIANT (38)..(38): wherein Xaa can be Lys or Arg
  VARIANT (40)..(40): wherein Xaa can be Leu or Tyr
  VARIANT (41)..(41): wherein Xaa can Gly, Asn or Gln
  VARIANT (44)..(44): wherein Xaa can be Lys, Leu, Pro or Ala
  VARIANT (46)..(46): wherein Xaa can be Asn or Gly
  VARIANT (47)..(47): wherein Xaa can be Asp, Asn or Gly
  VARIANT (50)..(50): wherein Xaa can be Lys or Gln

SEQ ID NO: 294 - protein, 15 aa, Artificial sequence
  motif 6-4
  VARIANT (1)..(1): wherein Xaa can be Glu or Asp
  VARIANT (2)..(2): wherein Xaa can be Gly or Asp
  VARIANT (5)..(5): wherein Xaa can be Ser, Thr or Ala
  VARIANT (6)..(6): wherein Xaa can be Ile or Val
  VARIANT (7)..(7): wherein Xaa can be Ser or Pro
  VARIANT (11)..(11): wherein Xaa can be Gln or Arg
  VARIANT (12)..(12): Wherein Xaa can be Leu, Met, Val or Phe
XXKRXXXWQDXXALK

SEQ ID NO: 295 - protein, 50 aa, Artificial sequence
  motif 7-4
  VARIANT (3)..(3): wherein Xaa may be Leu or Phe
  VARIANT (4)..(4): wherein Xaa may be Lys or Arg
  VARIANT (5)..(5): wherein Xaa may be Tyr or His
  VARIANT (7)..(7): wherein Xaa may be Thr, or Ser
  VARIANT (13)..(13): wherein Xaa may be Leu, or Glu
  VARIANT (14)..(14): wherein Xaa may be Asp, or Glu
  VARIANT (17)..(17): wherein Xaa may be Gln, or Lys
  VARIANT (22)..(22): wherein Xaa may be Met, or Lys
  VARIANT (23)..(23): wherein Xaa may be Lys or Arg
  VARIANT (24)..(24): wherein Xaa may be Arg, Asn, or Lys
  VARIANT (25)..(25): wherein Xaa may be Arg, or Lys
  VARIANT (27)..(27): wherein Xaa may be Gln, or Glu
  VARIANT (28)..(28): wherein Xaa may be Ala, or Met
  VARIANT (29)..(29): wherein Xaa may be Ala or Met
  VARIANT (31)..(31): wherein Xaa may be Leu, or Gln
  VARIANT (32)..(32): wherein Xaa may be Arg, or Lys
  VARIANT (34)..(34): wherein Xaa may be Gln, or Leu
  VARIANT (35)..(35): wherein Xaa may be Arg, or Thr
  VARIANT (37)..(37): wherein Xaa may be Glu, or Leu
  VARIANT (41)..(41): wherein Xaa may be Lys, or Arg
  VARIANT (45)..(45): wherein Xaa may be Lys or Arg
  VARIANT (47)..(47): wherein Xaa may be His or Tyr
  VARIANT (49)..(49): wherein Xaa may be Tyr, Phe or Ser
ARXXXQXLLQDYXXLQXETEAXXXXLXXXKXXKXXLXAEVXFLRXRXKXL

SEQ ID NO: 296 - protein, 21 aa, Artificial sequence
  motif 8-4
  VARIANT (2)..(2): wherein Xaa can be Gly or Ser
  VARIANT (3)..(3): wherein Xaa can be Pro, Thr, Ser
  VARIANT (4)..(4): wherein Xaa can be Ser, or Asn
  VARIANT (12)..(12): wherein Xaa can be Thr, or Ser
  VARIANT (16)..(16): wherein Xaa can be Pro, or Gln
  VARIANT (17)..(17): wherein Xaa can be Leu, or Val
NXXXRAGKRKIXWQDXXALRV

SEQ ID NO: 297 - protein, 21 aa, Artificial sequence
  motif 9-4
  VARIANT (1)..(1): wherein Xaa can be Ser or Val
  VARIANT (2)..(2): wherein Xaa can be Gln or Pro
  VARIANT (5)..(5): wherein Xaa can be Ser, Thr, or Ala
  VARIANT (7)..(7): wherein Xaa can be Val, or Ile
  VARIANT (8)..(8): wherein Xaa can be Ile, or Phe
  VARIANT (12)..(12): wherein Xaa can be Glu, or Gln
  VARIANT (15)..(15): wherein Xaa can be Glu, or Arg
  VARIANT (16)..(16): wherein Xaa can be Pro, or Glu
  VARIANT (18)..(18): wherein Xaa can be Asp, or Glu
  VARIANT (20)..(20): wherein Xaa can be Glu, or Leu
  VARIANT (21)..(21): wherein Xaa can be Glu, or Gln
XXSRXPXXDLNXISXXEXEXX

1-45. (canceled)

46. A method for enhancing a yield-related trait in a plant relative to a control plant, comprising increasing expression in a plant of a nucleic acid encoding a TLP (Tify like protein) polypeptide, a PMP22 (22 kDa Peroxisomal Membrane like protein) polypeptide, an RTF (REM-like transcription factor) polypeptide or a BP1 polypeptide, wherein:
(i) said TLP polypeptide is selected from the group consisting of:
(a) a polypeptide comprising the amino acid sequence of SEQ ID NO: 2;
(b) a polypeptide having at least 90% sequence identity to the amino acid sequence of SEQ ID NO: 2; and
(c) a polypeptide encoded by a polynucleotide which hybridizes under stringent conditions to a polynucleotide having the nucleotide sequence of SEQ ID NO: 1 or the complementary sequence thereof;
(ii) said PMP22 polypeptide is selected from the group consisting of:
(a) a polypeptide comprising the amino acid sequence of SEQ ID NO: 51, 57, 91 or 105;
(b) a polypeptide having at least 90%, 91%, 92%, 93%, 94%, 95%, 96%, 97%, 98% or 99% sequence identity over the entire length of the amino acid sequence of SEQ ID NO: 51, 57, 91 or 105; and
(c) a polypeptide encoded by a polynucleotide which hybridizes under stringent conditions to a polynucleotide having the nucleotide sequence of SEQ ID NO: 50, 56, 90 or 104 or the complementary sequence thereof;
(iii) said RTF polypeptide is encoded by a nucleic acid selected from the group consisting of:
(a) a nucleic acid comprising the nucleotide sequence of SEQ ID NO: 139, 141, 143, 145, 147, 149, 151, 153, 155, 157, 159, 161 or 163, or the complementary sequence thereof;
(b) a nucleic acid encoding a polypeptide comprising the amino acid sequence of SEQ ID NO: 140, 142, 144, 146, 148, 150, 152, 154, 156, 158, 160, 162 or 164, preferably as a result of the degeneracy of the genetic code;
(c) a nucleic acid having at least 90%, 91%, 92%, 93%, 94%, 95%, 96%, 97%, 98% or 99% sequence identity to the nucleotide sequence of SEQ ID NO: 139, 141, 143, 145, 147, 149, 151, 153, 155, 157, 159, 161 or 163;
(d) a nucleic acid which hybridizes with the nucleic acid of (a) to (c) or with a nucleic acid complementary thereto under stringent hybridization conditions; and
(e) a nucleic acid encoding a polypeptide having at least 90%, 91%, 92%, 93%, 94%, 95%, 96%, 97%, 98% or 99 sequence identity to the amino acid sequence of SEQ ID NO: 140, 142, 144, 146, 148, 150, 152, 154, 156, 158, 160, 162 or 164;
or
(iv) expression of the nucleic acid encoding a BP1 polypeptide is increased by recombinant insertion of an expression cassette comprising said nucleic acid, and said BP1 polypeptide is selected from the group consisting of:
(a) a polypeptide comprising the amino acid sequence of SEQ ID NO: 171;
(b) a polypeptide having at least 90%, 91%, 92%, 93%, 94%, 95%, 96%, 97%, 98% or 99% sequence identity to SEQ ID NO: 171, wherein the BP1 polypeptide is preferably not the polypeptide encoded by the nucleotide sequence of SEQ ID NO: 75649 disclosed in the patent application published as US20030135870; and
(c) a polypeptide encoded by a polynucleotide which hybridizes under stringent conditions to a polynucleotide having the nucleotide sequence of SEQ ID NO: 170 or the complementary sequence thereof, wherein said BP1 polypeptide is preferably not the polypeptide encoded by the nucleotide sequence of SEQ ID NO: 75649 disclosed in the patent application published as US20030135870.

47. The method of claim 46, wherein:
(i) said nucleic acid encodes a TLP polypeptide, and wherein said TLP polypeptide comprises:
(a) a Pfam domain having the Pfam accession number PF06200 and/or a Pfam domain having the accessing number PF09425, preferably both domains; and/or
(b) an Interpro domain having the Interpro accession number IPR010399 and/or an Interpro domain having the Interpro accession number IPR018467, preferably both domains;
(ii) said nucleic acid encodes a PMP22 polypeptide, and wherein said PMP22 polypeptide comprises a PFAM domain having the PFAM accession number PF04117 and/or an Interpro domain having the Interpro Accession number IPR007248;
or
(iii) said nucleic acid encodes a RTF polypeptide, and wherein said RTF polypeptide comprises at least two B3 PFAM domains, in particular four B3 PFAM domains, having the PFAM accession number Pfam02362.

48. The method of claim 46, wherein said nucleic acid encodes a TLP polypeptide, and wherein said TLP polypeptide comprises:
(a) all of the following motifs:

| | |
|---|---|
| (i) | Motif 1-1 (SEQ ID NO: 35): |
| | QLTIFY[AG]G[SM]V[NC]V[YF][DE][DN][IV]S[PA] |
| | EKAQ[AE][IL]M; |
| (ii) | Motif 2-1 (SEQ ID NO: 37): |
| | PQARKASLARFLEKRKERV[MT][NST][TAL][AS]PY; |
| (iii) | Motif 3-1 (SEQ ID NO: 39): |
| | MERDF[LM]GL[NGSI][IS]K[DEN][PS][LP][LA][VT] |
| | [VI]K[DE]EXXX[SD][SG]; |
| (iv) | Motif 4-1 (SEQ ID NO: 40): |
| | Q[LM]TIFY[AG]G[SMATL]V[NCS][VI][YF][DEN][D |
| | N][IV][STP][PAV][ED][KQ]A[QK][AE][IL]MFLA[G |
| | S][HNR]; |
| (v) | Motif 5-1 (SEQ ID NO: 43): |
| | RFLEKRKE; |
| (vi) | Motif 6-1 (SEQ ID NO: 44): |
| | QLTIFY[AG]G; |
| | and |
| (vii) | Motif 7-1 (SEQ ID NO: 45): |
| | MERDF[LM]GL; |

(b) Motifs 2-1 to 7-1 as defined in (a), and Motif 1-1a) (SEQ ID NO: 36): QLTIFYGGMV[NC]V[YF]E[DN][IV]S[PA]EKAQ[AE][IL]M;
(c) Motifs 1-1 and 3-1 to 7-1 as defined in (a), and Motif 2-1a) (SEQ ID NO: 38): PQARKASLARFLEKRKERV[MT][NST]L[AS]PY;
(d) Motifs 1-1 to 7-1 as defined in (a), wherein motif 4-1 of (a)(iv) is replaced by Motif 4-1a) (SEQ ID NO: 41): Q[LM]TIFY[AG]G[SMATL]V[NCS][VI][YF][DEN][DN][IV][STP][PAV][ED] and/or Motif 4b) (SEQ ID NO: 42): [KQ]A[QK][AE][IL]MFLA[GS][HNR];
(e) Motifs 1-1a), 2-1a), 3-1, 4-1a) and 4-1b), 5-1 to 7-1 as defined in (a) to (d) above;
(f) any three, any four or any five motifs as defined in (a) to (d) above;
(g) any combination of motifs as defined in (f) wherein Motifs 1-1, 2-1 and 4-1 are not present;
or
(h) any motif as defined in (a) to (d) above.

49. The method of claim 46, wherein said nucleic acid encodes a PMP22 polypeptide, and wherein said PMP22 polypeptide comprises:
(a) all of the following motifs:
Motif 1-2 (SEQ ID NO: 126):
GDWIAQC[YF]EGKPLFE[FI]DR[AT]RM[FL]RSGLVGFTLHGSLSHY
YY[QH]FCE[AE]LFPF[QKE];
Motif 2-2 (SEQ ID NO: 127):
LTID[HQ]DYWHGWT[LI][FY]EILRY[AM]P[QE]HNW[VSI]AYE[E
Q]ALK[RTA]NPVLAKM;
Motif 3-2 (SEQ ID NO: 128):
[DE]WWVVP[AV]KVAFDQT[VA]W[SA]A[IV]WN;
Motif 4-2 (SEQ ID NO: 129):
LVGFTLHGSLSHYYY[QH][FIL]CEALFPF[QKE][DE]WWVVP[AV]K
VAFDQT[VI]WSAIWNSIYF;
Motif 5-2 (SEQ ID NO: 130):
RY[AM]P[EQ]HNW[ISV]AYE[EQ]ALK[AR]NPVLAKM[VAM]ISG[V
I]VYS[LIV]GDWIAQCYEGKP[LI]F[ED][FI]D;
Motif 6-2 (SEQ ID NO: 131):
AHL[IV]TYG[VL][IV]PVEQRLLWVDC;
Motif 7-2 (SEQ ID NO: 132):
RYAPQHNW[IV]AYEEALK[RQ]NPVLAKMVISGVVYS[VL]GDWIAQCY
EGKPLF[ED][IF]D;
Motif 8-2 (SEQ ID NO: 133):
GFTLHGSLSH[YF]YYQFCE[AE]LFPF[QE]DWWVVP[VA]KVAFDQTV
WSAIWNSIY[FY]TV;
and
Motif 9-2 (SEQ ID NO: 134):
F[LW]PMLTAGWKLWPFAHLITYG[VL][VI]PVEQRLLWVDCVEL[IV]
WVTILSTYSNEK;
(b) at least one of the Motifs 7-2 to 9-2, preferably any two of the Motifs 7-2 to 9-2, more preferably all three of the Motifs 7-2 to 9-2 as defined in (a);
(c) at least one of the Motifs 4-2 to 6-2, preferably any two of the Motifs 4-2 to 6-2, more preferably all three of the Motifs 4-2 to 6-2 as defined in (a);
(d) at least one of the Motifs 1-2 to 3-2, preferably any two of the Motifs 1-2 to 3-2, more preferably all three of the Motifs 1-2 to 3-2 as defined in (a);
(e) any four of the Motifs 1-2 to 9-2, preferably any five of the Motifs 1-2 to 9-2 as defined in (a);
or
(f) any six of the Motifs 1-2 to 9-2, preferably any seven of the Motifs 1-2 to 9-2, more preferably any eight of the Motifs 1-2 to 9-2 as defined in (a).

50. The method of claim 46, wherein said nucleic acid encodes a RTF polypeptide, and wherein said RTF polypeptide comprises:
(a) one or both of the following motifs:

| | | | |
|---|---|---|---|
| (i) | Motif 1: | PVAFF; | (SEQ ID NO: 165) |
| (ii) | Motif 2: | HDLRVGDIVVF; | (SEQ ID NO: 166) |

or
(b) both Motifs 1 and 2 as defined in (a) and four B3 PFAM domains having the PFAM accession number Pfam02362.

51. The method of claim 46, wherein said nucleic acid encodes a BP1 polypeptide, and wherein said BP1 polypeptide comprises:
(a) all of the following motifs:

| | |
|---|---|
| (i) | Motif 1-4 (SEQ ID NO: 276): |
| | LNQ[DG]SXXND[EV]X[NS]DX[QP]G[HQ]X[GN]H[LP] |
| | EXXKX[DE][QE][VA][GE]VXE[DE]X[MI][TA][AP]D |
| | V[KN]LS[VA]CRDTG[NE]; |
| (ii) | Motif 2-4 (SEQ ID NO: 277): |
| | L[WR]RDYXD[LV][LV][QK][ED][TN]EXK[KR][KR]X |
| | LXSX[KN][RK][RT][KS]L[AV]LL[AS]EVKFL[RQ][R |
| | K]K[YL]XSF[AKLP]K[GN][GDN]SQ[QK]; |
| | and |
| (iii) | Motif 3-4 (SEQ ID NO: 278): |
| | [DE][DG]KRX[VI][PS]WQD[RQ]XALK; |

(iv) Motif 4-4 of SEQ ID NO: 279;
(v) Motif 5-4 of SEQ ID NO: 280;
(vi) Motif 6-4 of SEQ ID NO: 281;
(b) any two of the Motifs 1-4 to 6-4, preferably any two of Motifs 4-4 to motif 6-4, as defined in (a);
(c) any three of the Motifs 1-4 to 6-4, preferably all three of Motifs 4-4 to motif 6-4, as defined in (a);
or
(d) any one of the Motifs 1-4 to 6-4, preferably any two of Motifs 4-4 to motif 6-4, as defined in (a).

52. The method of claim 46, wherein said increased expression is effected by introducing, preferably recombinantly introducing, and expressing in the plant a nucleic acid encoding said TLP polypeptide, said PMP22 polypeptide, said RTF polypeptide, or said BP1 polypeptide.

53. The method of claim 46, wherein said nucleic acid encodes a BP1 polypeptide, and wherein the expression of said nucleic acid is increased.

54. The method of claim 46, wherein:
(a) said nucleic acid encodes a TLP polypeptide, and wherein said enhanced yield-related trait comprises increased yield relative to a control plant, and preferably comprises increased biomass and/or increased seed yield relative to a control plant;
(b) said nucleic acid encodes a PMP22 polypeptide, and wherein said enhanced yield-related trait comprises increased yield relative to a control plant, and preferably comprise increased biomass and/or increased seed yield relative to a control plant;
(c) said nucleic acid encodes a RTF polypeptide, and wherein said enhanced yield-related trait comprises improved early vigour and increased yield, in particular increased biomass relative to a control plant; or
(d) said nucleic acid encodes a BP1 polypeptide, wherein said enhanced yield-related trait comprises increased yield relative to a control plant, and preferably comprises increased biomass, increased shoot biomass, increased root biomass, increased NUE (nitrogen use efficiency) and/or increased seed yield relative to a control plant.

55. The method of claim 46, wherein said enhanced yield-related trait is obtained under non-stress conditions, and/or wherein said enhanced yield-related trait is obtained under conditions of drought stress, salt stress and/or nitrogen deficiency.

56. The method of claim 46, wherein:
(a) said nucleic acid encodes a TLP polypeptide, and wherein said TLP polypeptide comprises an amino acid sequence having at least 95% sequence identity to the amino acid sequence of SEQ ID NO: 2;
(b) said nucleic acid encodes a PMP22 polypeptide, and wherein said PMP22 polypeptide is any one of the polypeptides listed in Table A2;
(c) said nucleic acid encodes a RTF polypeptide, and wherein said RTF polypeptide is any one of the polypeptides listed in Table A3; or
(d) said nucleic acid encodes a BP1 polypeptide, and wherein said BP1 polypeptide is any one of the polypeptides listed in Table A4, preferably a polypeptide comprising the amino acid sequence of SEQ ID NO: 171, 239, 243 or 267.

57. The method of claim 46, wherein:
(a) said nucleic acid encodes a TLP polypeptide, and wherein said TLP polypeptide comprises the amino acid sequence of SEQ ID NO: 2;
(b) said nucleic acid encodes a PMP22 polypeptide, and wherein said PMP22 polypeptide comprises the amino acid sequence of SEQ ID NO: 51;
(c) said nucleic acid encodes a RTF polypeptide, and wherein said RTF polypeptide comprises the amino acid sequence of SEQ ID NO: 140; or
(d) said nucleic acid encodes a BP1 polypeptide, and wherein said BP1 polypeptide comprises the amino acid sequence of SEQ ID NO: 171.

58. A plant, plant part or plant cell obtained by the method of claim 46, or a seed or progeny of said plant, wherein said plant, plant part or plant cell, or said seed or progeny, comprises a recombinant nucleic acid encoding said TLP polypeptide, said PMP22 polypeptide, said RTF polypeptide or said BP1 polypeptide.

59. A construct comprising:
(i) the nucleic acid encoding a TLP polypeptide, a PMP22 polypeptide, a RTF polypeptide or a BP1 polypeptide as defined in claim 46;
(ii) one or more control sequences capable of driving expression of the nucleic acid of (i); and optionally
(iii) a transcription termination sequence.

60. The construct of claim 59, wherein one of said control sequences is a constitutive promoter, a medium strength constitutive promoter, a plant promoter, a GOS2 promoter, or a GOS2 promoter from rice.

61. A plant, plant part or plant cell comprising the construct of claim 59.

62. A method for the production of a transgenic plant having an enhanced yield-related trait relative to a control plant, preferably increased yield relative to a control plant, and more preferably increased seed yield and/or increased biomass relative to a control plant, comprising:
(i) introducing and expressing in a plant cell or plant the nucleic acid encoding a TLP polypeptide, a PMP22 polypeptide, a RTF polypeptide or a BP1 polypeptide as defined in claim 46; and
(ii) cultivating said plant cell or plant under conditions promoting plant growth and development.

63. A transgenic plant having an enhanced yield-related trait relative to a control plant, preferably increased yield relative to a control plant, and more preferably increased seed yield and/or increased biomass, resulting from recombinantly increased expression of the nucleic acid encoding a TLP polypeptide, a PMP22 polypeptide, a RTF polypeptide or a BP1 polypeptide as defined in claim 46, or a transgenic plant cell derived from said transgenic plant.

64. The transgenic plant of claim 63, or a transgenic plant cell derived therefrom, wherein said plant is a crop plant, a dicot crop plant, a monocotyledonous crop plant or a cereal, or wherein said plant is soybean, cotton, oilseed rape, canola, beet, sugarbeet, alfalfa, sugarcane, rice, maize, wheat, barley, millet, rye, triticale, sorghum, emmer, spelt, einkorn, teff, milo or oats.

65. The transgenic plant of claim 63, wherein:
(i) said nucleic acid encodes a PMP22 polypeptide, and wherein the enhanced yield related trait comprises increased yield relative to a control plant, and preferably comprises increased biomass and/or increased seed yield relative to a control plant;
(ii) said nucleic acid encodes a RTF polypeptide, and wherein said enhanced yield-related trait comprises improved early vigour and increased yield, in particular increased biomass relative to a control plant; or
(iii) said nucleic acid encodes a BP1 polypeptide, and wherein said enhanced yield-related trait comprises increased yield relative to a control plant, and preferably comprises increased biomass, increased shoot biomass, increased root biomass, increased NUE (nitrogen use efficiency) and/or increased seed yield relative to a control plant.

66. An isolated recombinant nucleic acid molecule selected from the group consisting of:
(a) a nucleic acid molecule encoding a polypeptide comprising the amino acid sequence of SEQ ID NO: 2;
(b) a nucleic acid molecule encoding a polypeptide having at least 90% sequence identity to the amino acid sequence of SEQ ID NO: 2;
(c) a nucleic acid molecule comprising the nucleotide sequence of SEQ ID NO: 1;
(d) a nucleic acid molecule comprising a nucleotide sequence having at least 90% sequence identity to the nucleotide sequence of SEQ ID NO: 1;
(e) a nucleic acid molecule which hybridizes under stringent conditions to a nucleic acid molecule having the nucleotide sequence of SEQ ID NO: 1 or the complementary sequence thereof;
(f) a nucleic acid molecule comprising the nucleotide sequence of SEQ ID NO: 56, 90 or 104, or the complementary sequence thereof;
(g) a nucleic acid molecule encoding a PMP22 polypeptide having at least 90%, 91%, 92%, 93%, 94%, 95%, 96%, 97%, 98%, 99% or 100% sequence identity to the amino acid sequence of SEQ ID NO: 57, 91 or 105, and preferably conferring an enhanced yield-related trait relative to a control plant when expressed in a plant; and
(h) a nucleic acid molecule which hybridizes with a nucleic acid molecule of (f) to (g) under high stringency hybridization conditions and preferably confers an enhanced yield-related trait relative to a control plant when expressed in a plant.

67. An isolated recombinant polypeptide selected from the group consisting of:
(a) a polypeptide comprising the amino acid sequence of SEQ ID NO: 2;
(b) a polypeptide comprising an amino acid sequence having at least 90% sequence identity to the amino acid sequence of SEQ ID NO: 2;
(c) a polypeptide encoded by a polynucleotide which hybridizes under stringent conditions to a polynucleotide having the nucleotide sequence of SEQ ID NO: 1 or the complementary sequence thereof;
(d) a polypeptide encoded by the isolated recombinant nucleic acid molecule of claim 66 and comprising the amino acid sequence of SEQ ID NO: 51, 57, 91 or 105;
(e) a polypeptide comprising an amino acid sequence having at least 90%, 91%, 92%, 93%, 94%, 95%, 96%, 97%, 98% or 99% sequence identity to the amino acid sequence of SEQ ID NO: 51, 57, 91 or 105, and preferably conferring an enhanced yield-related trait relative to a control plant in a plant; and
(f) derivatives of any of the polypeptide of (d) or (e).
